United States Patent Application Publication US 2026/0191916 A1 - sequence listing, part 100

SEQ ID NO: 642 - DNA, 3016767 bp, Lacticaseibacillus paracasei (residues 1-1,508,384 of 3,016,767)
  source 1..3016767: mol_type = genomic DNA
atgcccaatttagaggaactttgggcttacctgaatgataaattccgtgaagaattgaccccggtcggttacagcacatggatacagacagcaaaacccgtcaaattaaccaaagataaactcgaaattgaagtcccagcttctttacacaaagcttattgggaaaagaatctcgtgaccaaggtagtcgaaggcgtttacgaattcgcgcaacttgaagttgatcccgtcattatgaccaaggatgagttgcagccagctccggctacagatcaacgtcctgcggttgaagaagacgatcaaaatctgacttttaaggcaaaaacccatttaaatccgaaatatacgtttgaccgcttcgtgattggtaagggcaaccaaatggcccacgcggctgctttggcggttgctgaagcccctgggacaacatacaaccctctgtttatttatggtggcgtcggtcttggcaaaacccacttaatgcaagcgattggtaatttggtgctaggtaataatccagcagccaacataaaatacgtcaccagtgagaattttgctaatgacttcattaactcgattcaaaccaaacaacaggaacaatttcggcaagaataccgaaacgtggacctgctgttggtagatgatattcagttttttggtgacaaagaggccacacaggaagaattttttcataccttcaatacgctgtatgaaaatatgaagcaaattgttctgaccagtgatcgcctgcctaacgaaatccccaaacttcaagaacggttggtttcgcggtttaataagggcttgtctgtcgatgtcacaccgccagatctggaaacacgaatcgctattttgcggaataaagccgatgctgaagatctcagcattccagatgacaccttgtcttacattgctggtcaaattgaaagtaacgtacgtgatctcgaaggggcgttagtacgcgttcaggccttttcaaccatgaaaaacgaagatatcacgaccagcttagccgcggatgccttgaaagccctgaaacttgatgaccgcagcggacaattgaccattccgcaaatcctgaatgctgtcgcgaaatattttcagctgacggttcaggatcttaaaggaaagaaacgcgtcaaacagattgtcattccgcgccaaatcgcgatgtatctagcgcgcgaaatgaccgataacagtttaccgaaaataggtcaggaaatcggcggcaaggatcatacaaccgtcatccatgcccacgaaaaaattatggcttcaatgacaactgatgagaatttaaaagctcaagtgatcgaattgcggaatatcttgaaaaaccgcgggtaatgcacatgtggataaccttcaaaaacaagccattttatccgtcgcacttatccacaagtgcatcactttctcagttgttgtttctcaaagttttccacagtttgaacacgccctattactattacttcaaaagctttatattatatatataaaagacgttcaggaggctcttatgaaatttacgatcacccgatccacattcttaaaaaccttgaatgatgtttctcgggccatttcaaccaaaacaaccattccgattctgactggattgaaaattgtgctcaacgatagcggcttaatcctcactggtagtgatgccgatatttcaatcgaatcacggatcaacgcaacggatgaaaataatgatctccaaatcggaagcactggtgaaatcgtcttgccagcccgtttctttagcgaaatcgttaaacgtttgccagaaagcacaatgacgcttgaagttaaagacaatttccaaaccgtcatcacgtctggggcatctgaatttactattaatggtttggatgccaataactatccgcggttgccagaaattacagccgatgcagcgttgagtgtttcagctgatgtgttacgtcagttgattaaccaaacagttattgccgtttctaatcaggaaagtcgaccaatcttgacaggggttcatctgacaattaccggcgatcagttggtagctgttgcgactgattcccaccgccttgcgcaacgtagcctgaccttaccaacagcaagtgcctcggattatgacatcattattccagggaaaagtctgacagaacttagccgcatgttaagcgatgacgttgaaaaaatcgaaattcgcattgcggaaaatcaagtgctgttcgtgtttgggcaaacggccttttattcacgcttacttgaaggcaactaccctgacacaagccgacttattccaacatccagcaatacgcaagcggaatttgacgcaccagcattgctggcctccattcaacgtgccagcttgctgagtcacgaaagtagcaacaatgtggttcggcttgtccttaatatcgctgatcaaaaagcgactatctacggtaattcgccagacgtcgggaatgttgaagaagtacttagtttcaacaaacttagcggcgaggatctagaaatctcgttcaaccctgactatatgaaggatgccttgcaaggatttggccaaacggcaattgaagttgacttcaccgcaccattgcgaccattcactttggttccaacagaagacaaggaacggtttatccaactcatcacgccagttcgaacgttttaacacgtgatgtagcaacaaagagcgccaattaaaaaagattctagagagtgatgaattctctagaatcttttttgttatcgaactgatattcgccaaagcttagtgttttcttttgacgaaataataatagacaaatgccaagacacaacccatcaagacgctgaccaagattgtcataggattcagccaattatgaaaatctgtattgaaatttccatagacgtacgtagccactgaagaaattaaaaagataccaaagaccgacttagtagtagatgtcatattttcctccatatatgggtgcagactgcgctttcacaaatagaaaataaatacataataatagatagtcaatatattatttttataaaataataagagcctatacaaagctttatgttaacttttatgaaattaaaaagtgacttttaatgtaaaaagacacatttatacattgttctatgctctaattatacagaagtgattatagatagccaagtgtgcagcctttcatttttgaaggctaatcgcgattcacgatcaaattgcaaaaacgttcatttgcgttgcttgatatttttaaacgcagatttggatattgctggacaaaagtaaaagtagctttagagttggtcaaaatcgatagaaatcaaaatttagccgattttggcctttctgggtctttttagtctagggggacgcacaacgttcagattgcctcagagccgctttaatgccgttttagaattgtgttttaagtagtataagggtataattaatttgtgttcattgacgacaaatcgcggtttaacgcggtttgtctagcacttttcggaatggagggcgacagcaatgacaacaatcgaaatcacgaccccttttttgaccttgggccagtttctgaaagaggcgggattgatcgatagtggcggtgcggccaagtggtatctgggtgaaaactcagtgacagtcaacggcgcagctgaggagcgacgtgggcgcaagctgtatccagatgatcaagtcagcgtggccggccaaacatacgtgatcgtgagcgcatgaaactggatcacttggtgctgaaaaattatcgcaattatgctgctgttgatacaacattttcaccagaaatcaatgttttgattggggcaaatgctcaaggcaagacaaatctgcttgaatcaatctatgttttggcattggctcgcagtcatcgaactaacaatgataaggaactgattcgctttggtagcgagtttgcacgggtttccgggcaagtttcgcgacaaagcggttcccatcagttggagttgattatcagtcatcaaggcaagcgtgcccggattgatcgcatcgaacaaccgaagctctctcagtatttagggcattttaatgtcatcttgtttgcacctgaggatttagccatcgtcaagggcagtccggctgggcggcgtcgcttcatcgacatggagtttggccagatgagtcccaagtacctttataatctgagccaatataaaacgtttttgaagcagcgcaatgcgtatttgaagcagcttaagtatcatcaggccaaggatctggtttatctggatgtgttgactgactcgcttgcagctttcggggcagagctaattacggcgcgcgctaagttgttggagacgatgtcggattatgctgcaacgattcagcaagatatcaccaaggggcgggagtcattgcatttttcttatcaaacacaggttgaccccagtcttcgcggtgacagtgagcaggtttacactgctttgggcgagatgtttgccaagcagcaagcgcgcgaaatcgaacaaggaaccagtttagtcggtcctcagcgagatgatgtgttgttcatcgtcaatgataaggatgttgccaattttggcagccaagggcaacaacgcaccacagcattggctgttaagctggcagaaattgaccttatgaaggatcaaaccggcgaatatccagtgctattactggacgatgtgttgtcagaattagatgcggctcgccaaacccatttacttaaggccattcaaaccaaagtccaaacctttttaaccaccacaagtttggaaggcattcaaaaagaaatcatcgcaacccctgcagtctttaaagttgatgaggggacattagcaagagcgtgaaccagcccggttagaaaccggagtgtaagcgcgcctgaacgtgatgaccgtattttggccattgcgttcaggttccttacacgcaggtttctgtgccagtgaacgcattttaacaaggaggataaccagtgacggacaagaaagaaacggccgaagagaagaaggatgaactggcggctgagtatgatgccagccagattcaagtactttcaggacttgaagcggttcggaagcgtccagggatgtatattggctcgacaagcagccaaggcttgcatcatttggtctgggaaatcattgataacgggattgatgaagcgctggctgggttcgcaacgcggattgaagttgaagttaacccagataatagtgtgacggtaacagatgacggtcgcgggattccagtcgatatccagtctaaaaccggacggccagcacttgaaacggtttataccgttttacatgccggtggtaaattcggcggcggcggctacaaagtttccggtggcctacatggtgtcggggcatcagtcgtgaatgcgttgtcgactgatttggacgtcacggttactcgtggtggcaaacgttactacattgactttattcgcggcaaggtgaacacgccgatgaaagtgattggcacggcaccggagcacgaacatggcaccaaggttcattttctgcctgatccggacatttttaccgagattagaacattcgatgataagatcctgaccaccagaattcgcgaactggctttcttgaacaagggtctcaagttgacctttaccgacaagcgcgcggcaacgcacgagaagctggtgttccattacgaaggcggcctcaagtcttacgttgactttttaactgagaaaaaagaaaacctgttacaagaaccgatttatgtggaaggacaagacaaaggcatcacggtggaagtcgcgttgcaatacaccaacgactatcacagcaccttgttgacgtttgccaacaacatccatacgtatgaaggcggcacgcatgagaccgggttcaaaacggcgctgacacgggtcattaatgattacgctcgccggtctggtgcgctaaaagacagcgatgatccgttaagcggggatgatgttcgtgagggcttgacggcggttgtttccgtgaagcatccagatccgcagtttgaagggcaaactaaaaccaaattagggaactcggatgcccgaacagtggttgaccgtaccttctctgaccacttcaataagtttctcatggaacacccagctgatggcaagctaatcattgacaaagctatgctggccagcaaggcacgtttggcggctaagcgggcgcgtgaagtgacccggaaaaagagcgggttggaaatttcgaacctgcctggtaaattggccgacaacaccagtaaggacccagagatctctgaattatttatcgtcgaaggggattccgctggtggttctgccaaatcagggcgtagtcgcctgacgcaggccattttgccaattcgtgggaaaattctgaatgtcgaaaaggcttcaatggaacgcatcttggccaatgaagaaattcgaaccttatttaccgcgatgggtaccggttttgggcaggactttgatatcaataaggctcgatatcacaaactgatcattatgaccgatgccgatgttgatggtgcccacattcggactttgttgctgacgttgatttatcgctacatgcggccagtgcttgacgctggctatgtctacatcgcacagccgccgttgtatcggttacgccaaggcaaaatgacgcaatatattgattccgatgaagaattgcaagacattctaggccagttgccgccgagtccaaagccagagattcagcgttacaaagggcttggggaaatggacgccaaccagctatgggagacgaccatggatccggataatcggcgcttactgcgggtatcgccaaaggatgccgaagctgcagatggcgtttttgaaatgttgatgggtgatcatgttgaaccgcggcgtaaatttattgaagataacgctgtgtttgttgatccgaacaacattgatgcttgatcgaccagtttaactaagtcagcttttgcatgagaatttttgagaggagacttttcgcttaatggatgatcgccaagaaagccgaattaccaatgtgaacctcggcgaaacaatgcgtaaatcattccttgaatacgcgatgagtgtcattgtggcgcgggccttgcctgatgtgcgcgatggcctcaagccggttcaacggcggattctgtacggtatgaatgaactcggcgtgacgccggataaaccgtacaagaagagtgcgcgtattgttggggatgtcatggggaaataccatccgcatggtgatagctcgatttatgaagggctcgtacgaatggcacaggacttcagctatcgttacatgctggtcgatggccacgggaactttgggtctgtcgatggtgacggtgccgctgcgatgcggtataccgaagctcgcatgagcaaaatagcagtcgagatgctgcgtgacatcaacaaagatacgattgattttcaggataactatgatggcacggaaaaagaaccggttgttttaccggcacgttttccaaatttgttggtcaatggggcgactgggattgcggtcggtatgacgaccaatattccgccgcataatctgtcagagactatctcggcgctgcacgtgttgatggataatccagatgccacgacagctgacctaatgcaggcactgccaggacctgattttccaaccggcggcgttgtgatgggtaagtcaggcattcgccatgcttatgaaactggccgcggcacgattgttttgcgcgggaaagttgatgttcagacggagaagtctggccgtgaacggatcgtgattaccgagattccatatatggttaacaaagccaaaatggttgaacggatcgcagatttggttcatgaaaagaaaatcgatgggatcgtaaccttgcgggatgaatctgaccgtgacgggatgcggatcgtcattgatgtgcgccgtgatgctagtgcatcagttattttgaataacttgtacaagctcacgccactacaaaccggcttttcattcaacatggtggcaatcgttaatggtgcgccaaaagtgttgagcttgaaacagatcctgcaatattatctggatcatcaagaaaacgtcattcgtcggcggacgcaatttgacctgcgtaaggccaaggctcgtgagcatatcctcgaaggattacggattgcgcttgatcatattgatgaaatcatcacgattatccgtagttctgaaactggcgacaaggcaaaagtcatcttgatggacaagtttaagttgtctgacaagcagagccaagcaatcttggatatgcggctggttcggttgaccggtttggaacgcgagaaggttgaaagcgaatataaggatgttgaagcagcgattgctgattatactgatattcttgctagaccagaacgtgttcatcagatcatctacaacgaattgctggatattcagaagaagttcggcgataagcgccgtactgaattactggtcggtgaagtgctcagtcttgaagatgaagatctgatcgagcaagaagacgtggtcatcacgttgagtcataacggctacgtcaagcgattggcaaccagtgaattcaaggcacaaaatcgcgggggtcgcggtattcaggggatgaacgtccatgatgacgatttcgttgaacgcctgatttcgacttccacgcatgatgtcctgctcttcttcaccaacaaaggtaaagtttatcgcagcaagggttacgaaattcctgagtacggtcgaaccgcaaaagggattccaattatcaacttgcttggtgtcggtgccggtgaaaagattcaaacggttatcaacgtgcatgaaggcgaaaatgatgatcgttatctcttcttcgtcacgcaaaaaggcgttgttaagcgcacaccggtgaaggaattcgccaatattcgcagcaacggactgattgcgttgaatctcaaggatgaagacgaactgaataatgtcatcctaacgtccggacaagacaatatcctgatcgggacgcatctgggttacagtgtgaccttcaaggaacaagacgttcgctcaatgggacgttcagcgactggggttcgaggtattcgtttacgtgaacacgattacgtagtgggttccgacattctcaaacccgattccgaagtctttgtcatttcagaaaaaggttacggtaaacggacggcagcgaaggaatatccgattaaaggtcgtggcggtaaagggatcaagacagccaacatcaccgccaagaatggtccgttggcaggggtcactaccgttgatggtaccgaagatattcttgttatgactgattctggtgtcatgattcgcttcaatattcaaagtgtttcgcaaactggccgagcaacgttaggagttcgtttaattcgagttgacgacgatgccaaggttgcaacgatggccaaggttgaaccggaaagcgacgatccagacgatggcagcaagccagatcagccaactagcccgacagacggttctgctgcaccaacctcgcagcagccagctgatggttcgtatgctggcgatgccgatcagcaagtgagccaattgcttgatcgcgctgaagctgatcaaccagagcaacatgatactggcgaccagcctgaataatctaataatgctagcatcaattgagctgattcacgctcaataaaaataccggtcgaaatggcaatttgccacttcgaccggtatttgtttgcatacagataacctcaaatcgtgaaggttgattggttgcccatgcgcgccttaagttcatggatgatcttaacgccgctgctggtaccgatacgagtcgcaccagctttaatcattgccaaaaaggtatcaacatctctgataccgccagccgctttgacttgcacttgatcgccgacagtttctttcatcaaagccacattttcgacagtggcaccggctgggccaaagcccgttgaagtcttaatgaaatccggaccgacgtccttagcaatagttgccattttgatgatttctggcttggtaagataggcggtttcaaaaatgactttgcacggtacattgaccgcatgacagacagcaacgatttgacgcatttcattttcaagataactgtattgctgttccttaagcgccgtgatattgatcacgtagtcaatttcgttggcaccgttttgtaaggcgtctttggtttcaaaaactttggccgcgatgctcgtttggcctaaggggaaagcaattgcggcgccaacatcaatgtcggtacctgctagttgtttcgcacaaaaagccgattggacttggttaatcgccaccattttaaaatgatattgtttggcctcgttgcaaagctggcgcaaatctgcgtgagttgcatctgcatgtaagtttgtgtgatcaatcatgcgactgaattgatctaaagtataagctgtcatgatttttcctccaaagttgaattcgtttacatttagcataccactttttgcgtaatgtatatctgacagcgataaatagtacggtgttgtgcaagcaaccatgcagaagaaaggtcattgcggtcaaggtccttatgtgcaggttgctgcaccagtgaacgcgtttagaggaggagaagcgaatgttgaatagtgtgagtctaacagggcggttgaccaaggaacctgaagttttccgaacggctaacgagcttgatatcgtccgatttacgttggcggtgaatcgcgttttcaagaataaaacgggacagcgcgagactgattttattgagtgtgtcatttttggcaaacgcgccttaacttttgcgggatcaactaccaaagggtcattgttgggtatttcagggcggctgagtaataatcattttgaaaataagcaaggtgagcaagtgtggcggaccgctgtcgtcgttgataattttgcttggttggagtcgcgagccacgacggaaagccgccgggcagggaccttgcaggcgacaggaacagacgacgtcatgccagtagaggaaggcaccccgccacaggtcgcaaccgacgatctgccattttagtggtggtattcgccgcggatctatgctacaattttaactcgtgagtatccggctattctatagccttagtactctccttgctccggcaaatgaccggggcctaaagtccataaggaggtgaatcgtcatggctgaaaccaaatatgaagtcacttatatcatccgtccagatttggacgatgctgcaaagactgaattggttgaacgttttgacaatattttgaaggaaaatggtgccaacatcattgattccaaggattggcaaaagcgtaagctcgcatatgagatcaacaagtacaacgaaggtctctatcatatcgtgaacttgtccgcagaagatgacaaagcgatcaatgaatttgatcgtcttggcaagatcaacaacgatattctgcgtcacatgatcgtgaagcgagaagactaatcgtaacttttttgaaaggggcgctacggcatgcttaacagtgttgcattgacaggtcgattaaccagagatgttgatttgcgttacacgcaaagtggcacggctgtcggttctttcacgctggccgttgaccgccagttccgcagtgcaaacggcgaacgtgaaactgacttcatcaattgtgtgatctggcgtaagtctgcagagaactttgcaaacttcaccaaaaagggatccatggttggagttgaaggccatatccaaacgcgtacgtatgataacgcgcaaggacaaaaggtctatgtgaccgaagtcgtcgttgaaaactttgcgttgctggaatcccgggcaacgactcaacagcggccgtccgaaccggcaaatccagctggccaaggtaatcagaactatggcggcgggcagcagtttggcaataaccaaccgcagaatccgccaagttttggttcacaaggcgccccgaacaatgcatcatcatcgaatccgggtcaaaatccggcagcaagtcagaaccaaggaggcaactccgcggctaaccctgctaatcccgatccgtttgctaataatggcaagccgatcgacatttccgatgatgatttgccattctaaggtgtgactcaaagtcgcactaaccgcggtaataccttcaggcgaagggttatctaagtggaatctttgataagggaggaattctcatggcacaacaacgccgtggtggccgtcgtcgtcgtaaagtcgacttcatcgccgcaaaccacatcgaatatatcgattataaagacacgaacttgttggatcggttcatctcagaacgtggcaagattttgccgcgtcgggtaaccggcaccagcgctaagaaccaacgtaagctgacgatcgcaatcaagcgagctcggattatgggtcttctgccatttgtttcagaagattaagaaagatacaaaaaaacgtttcaactggtactttaagttgaaacgtctttttttattatttttgaaaaaataaaatttttatgaaacggatgtcttttaaaaagataagagttgctgacccactagaagatctcaatcatagtccaaaagtttttgcacatttttaccatattaattaataaagtttcacagtgaagaaatcgaaactattgaatttttaaattttccgggttagaaatcgtactttgacaagtgtatagtaggtgcaagaacagctaattaacgttaaagtatgataattgacaattttgacgatttatattcaactaattatatattaataatatttaatttgttgtagttatttgtatgctgataagcattttggaggacagatgagatcaataccaaataatgataagaagaagatgatcacaggttcagcgtggatgactttaggaagtattacgtcgcggattatgggagcgatttatattattccatggggactttggttgggttcgaatttttctttagcaaattctcttttcgccaagggatataatgtgtacagtttattcttaattatctcaactgctggcattcctggtgccttatcaaagcaaattgcacattatgacgctattggagagatggagacttcaaatcgattatttaaagattcattattcatgatgcttggattaggggtgttttctgccgtgatcatgtggttgattgctccactgctcgcttttcagaatggtgaagtagatatacgaatgatatcgattattcatgcactttgctggccgttgacgattatccctgccataagtatacttcgaggtctctttcaggggcgagcacaaatgggacccagtgcagtatcacagttagttgaacaatttgcaagaatcggatatatgcttttagcaacatacgttattatggtgagcaatgatggaaattatgtgagagcagttgctcattcaactttcgctgcgtttgttggagcagtatgtgcattggtgtatttgttaattgctttaaaaaaacagatatacttttcaaattatgaagcacttcagaaacagtcacaaatacaacgaaaattagcattagttgaactgtgtcgacaatccttccccttcgtcattttagattcggctatcattctttatcaattcctagatcagtggctgcttaaaaattctataattcaggcagttaagctaatatatgcattattgcggtataataaatccattggaattagctgttttcctgcattttccttgcattttttgggaacctactcggaggttatcgtatggtctatcgtcacagcccgcttcaattgtcatttgaatcctttggtgccggtttaagtaccccacttagctctaacaatgagtggatccagttggcggaggtcatgccctggaaagctctcgatgaggcataccaattggagttcaccaaaaatgcgggacgtgcggcaaaaccatttcgtttactctatggggcaatcctgatccaacaacggatgggtttaactgatcgtggggtggttgcggcaattcgtgatacacccgcacttcaatatttcatcgggttgtccgaatacaaagcggttgagccgttcaattattccagcctggcacactttcgcaaacgaattgccgatatctccgagctgattacgaatatcatgaatgatacagtacgcgccaagatcgaagcgttggtcccattcaaagtggacaccgtcatcacggacgcaaccgcagtgccagtcaaaatcaagtatcctcaagacaccgtcctcctcaaccaagcaaggctgaatcttgaggcgatggcgatcgatatggcacaccaacttggtgtgccaaacccacgcatgtacaaacgcgaggcgaagcattgttggacctcattttcacgacatccaaagcaacagcgtggtggctttcataaacaggtcaaggcccaacttcaatatgtgcgccgtgatttgcggtacatcaacgaattcatcgatcagggtgcgactctaccagatgaacaagcgattcgcttaggcgtgattcgaattctatttgaccagcaatggtacatgtatacccacaagactcaccacgttgaagaccgaattgttagtctccaacagccgtacattcgcccaattcaacgtggtaaggccaatgctaaagttgaatttggggcgaagattgactgttcgttaagtgaaggcgtagtcgacattgaacgttttgatttcaccgcattctctgagggccaagacttcgcggaaactttagaccactattacgaccttcatggacattatccggatgaagtactggccgatacgctgtaccgtaatcgggagaacctaaagctgtgtaaggatttgggtatccgaatctgcggtccgaagcttggccggcatccaaaacacgttgatgcagcgaaacggcgtgaggatactgatgccgagaatcgaagaggtaccattgaacgccggtttgcttttatgaagggcacgctggggcttgacttggtgaacactcggacagctgaatcactggccgtcaagattgacgcggccatcgtcttgagcaatgtgctgaccctgttaagggtatttgctataccaattttaattttggctaaattcgagggtgaggcctatcaaattcgctataaatttactacaagggtcgaagatatggtggcctagttcaacagccactagatcagtacatgttcccaattattatgaaaaacatttcctcaattttcaagtcaagtgcaacgatgataacgaattcttgatagtggtctaggctgttacgccatgcatcggtagtaatcgcatgggcgaagatagttcagaatacgtctgggacgatggttcagtgcggattggactgcttgaatttcaaccagggtaattgctctgagagacttccctttcgggaagaattccctaagcagtccattggcgttctcgtttgtgccacgctcccaaggcgagtacggatgtgcgaagtaaatctgggttccaacaatctctgataacttggcaaactcggaaccattgtcaaaagtgatactctcaaattccttggccccgtagtcgtcgatcgtgtcctgcaaggctttaaggcaggtgcccgcatgatagtcaggaatcttgacgatgatctcagtccggctgtaccgttctgtgagcgtcattaatgctggctcatcagctaagcgaatacctttgaccaagtcgccttcccaatgtcccacgcctgtgcggtcattcacggccgcaggacgcaactcgattgagtcgccgtatatcttcttattcttgcgcttgtgggcgttcttatagcctttgatgcggcgtcggagcttcttgggaagtgtcatgttgtctagctcaagcagcccggcgtcgatgtagcgatagacagttgtcgttgaagggcaagccttgccctggtcgcgatagaagtgtacgaagctatcaacgctgtgtacgcgcggcttacgagtaagctccctggcgagagccttgaagaacgcacggccggtcttaagaaaggcgtagtgaccggttctatcgcgtttacggtcgtgcatggcttgggcagtttccgcaagatagacttgatgcgagtgacgcttcgagtcgagctgagttacagatccacgcgtgatttctcgtgagattgtcgctttactgcgatgaagcttctgtgcaatcacggtcgcggtgtcaccagcagcctgaagggcctgaattgtagcacggtcgctaaaactgagttgttggtaatgcttgtgggtgttagtctgagagtgggtcatgaagattcctgctttcttgtttagctagcactaacaagaataggtcttcatggcctttatggtctagtcgtcagggtgttgcacttgaattgtaaactggggtatgaaaaacatttttaaagaaagcaatgaaaccatcaattatctatatggattatttgggtttaattctaacaaacttacgatgattgtaatttccttgtcgacagcaatggcagtaaccgcaattccccttttgtcgaagtctttttccagaaatgattatcgagatttatctaaaaagattgtctctagtttgaagctattcttttttattatgataccaggatccgtaggcatgatatgtcttgctcatcctctttaccggatcttctataggtcatttaattacttaggaattcacattcttgagttaaatgctgcagttgcaaacttaattggtttatttattttgttagttgcaatcatgcaggcagtccatcacagccgtcttgcaatcaagtattttgcatttggtgtgattgcaaaaatgctagctgaggtattttgtatttggttttttgaatcatatggccctttagtggcaactgctataggacttggagtcagttcttttttcatgttaaagcgattgataatttctttcgatatcaatttgagacccatatttaaatattttcttggagtaactctattaactataataatggccagtattttgcaaatattaaagtttttcatttataactttcttgggaaaaaagcctctagttcaattctgacattaatcactagtgtcattgttggtattctggtctacggttttctaagtttaaaaacaagggctgctgacgaggcgtttggcttctcattgaataccttacgttcacgatttcagataagttagtgattaaatttttgatgcgtcgagtcgaaagattgcagtccttagggttaaccagaatgatcgaagcttagagtgacggctaatgaacttttaaagcataataacgtatataaggaagccatgtataaaatgagactatcattaaacctaaaacactcactacgagtcagttaaaggcgatagtataaataagcgtatttttgccagtatcaacaatacaggcgagtacactattgaatggaggtggtactgtcaatgtgtagcaatcatgtttcaaaattaatagtttggctggtctgtagtttacttaacattttaatacgaatgctattaggggatactcttgcggaagcctcagtcaacctactcactatcattcctattctgtgggttattgtggagggtggcagattgattctgaccaatttcaaaacaaaagaacgtgaataaacatgccatagtacgaaccccatctgaactgatattcatatcaattcagacgaaagggattaacaatttaacagcgtatttcagaaatctgcttcataagcagttaaaataatccaaactagatgcgcagttcgcctaaccatagctttacatggtacaagacgagtgtgcttttttgatggcttaacaaaggaacacgcacggaacaaaccaattgcgtagcaagccatgttcccacaaataaacgaacgcccttttaaaaaggggagcagtaaagaagcagcccaagatgtgacaattgaagtatttatcacaagcttatcgttatataaaataacgaaacggttctataatagccgtgatcaggaatacagggaaaaatgacattattggttaatagaggtgatcaaaatggggctcacgttagccacgattccgctggctgtgacgaatctgtcacgcatgcagtttgcggtaaccgcgatcacgcattttctatttgtaacaacgaccattggcatgttgttgacaacgatgatttttgaatttatgtacgcgtatggccgtggcgatactgaaaagtatggccggctgaccttattcttcagtcggattttcttcttcagttttgggacaggtgttgttaccgggctgatcatggagtttcaatttgggatgaattggtcggcgtttacgcggttgatgggcgatgttgccggtgtaccactggcgatcgaaagtatgatttccttcttcgttgagtcgaccatcatcggtttatggcgctttacttggggcaagttgccaaaacgagcacatgcttggttaggcgttgggatgttgggcgcatcgcttttttccattgtctggatcattgcaatcaatgcattcatgcaaaatccttatggtttccgtctggaaggtggccgtgcacggctcacgagtctgattacgttattacagaacccgcaatatcggccggaatttttgcatgttttattcgcgatcctgatcaccggcggatttttgacagcagggattgctgcctggcagattctgcacaagcgtgatacgtcagcgttcaaaattgccgttcaaattggcttactcattgctttgccagcagcattcttacagccggcacaaggcgacgatcaaggtgccgcaacagcagcgttgcagccgatgaagtttaccgcaattgaaggacggtatgagacggaaggtagtcccacaactggggcaccttgggcgatggctgcgctgatcaatgaagacacgcacacaaccaaggccgtgtcgattccgaacatggggacttacttcggcaagaacacgttcactggcaccatgccgggcatgaacgctgttgccaaaatgtatcacgcaaagttcgataagacggttgccaagtcgtacgatggccagatgacttattatccgccagtgaccctgctgttctggaccatgcatttgatggtttatgcggggtacttcttcacgatgttcgcgttgtttgcgacgatcatgctgcatcggcggcaatcggcaatcgaagatcatcccaaaacgttgcggacactcggttgggtactatggctgccatatttgaccttcacatctggctggatcgttgcggaagttggccgatatccatttgtggtttatgggctactcacgcagtacgatgcggtttcaccgagtgtgaccgtcactgaggctggtacgagtctggccttgttcttaatggccgatatcttcttagtgaccacgatgatttacatttcacatcgcactgttaaacgcggtttgccgcaaatcaccggtgattatccagaagatcgcacaattccggatccatttgcaaaggaggcgttcagtcatgcctagcctttcaaatttacaagtgatctttctaggtagtggctggtgaaagcagcataactgcaagctttattggcatcaaagaatagtaaagattataattagtgcaaagtaaacatgggctaacgcctgttttccttgcactttttatttttcctggaggaaaccatcatggcttatcgacatcgtgctacccaattgtcatttcaatcctttaacaacggccttggtgtgccactttcttccgacaatgagtgggttcaattagccgacatgctcccgtggcaacagctcgatgaagcctatcaacttctttttactgagatgggtgggcgcgctgctaaaccctttcgtctgctttacggtgccagtttgatcaagcaagcagaacatctaaccgaccgttcggtcgttaccgctattcgtgataccccggcttaccagtactttatcgggctagacacctacacaaccgacctgccgttcaaccactcaaccttggtttattttagacgacgcatgggtcaaataacggaactagtgcgaaatatcatcagtgataccttgcgcgaacaaatccaaagcttattgccagatgatgagctccgtgtcttgatcacagacgctactgcggtgccaattgaaattcgttttccacaagatacttcgctgctaaatcaagctcggctcaatctagaagaaatgttattagacatggctcatcagttgcaaatcaagcctccacgaacctacaaacgtgaagcaaaagctaagtggaccgcttttgctagaaaaccgcggcgttgggctaaggaaacacgcaagcagatcaaagtacagctccagtatgtccgacgtgatctacgttatatcgatgtgctgttggcccacggtgcctctcttaacgaaaggcaaaccaaacgattggctgtgattcgtgaactttttgaccagcaaatgttcatgtatgaaaatcggacccatcgggtcccaggacggattgttagcttggcacaaccgtggattcgcccgattaaccgtggtaaagccaaacaacgaaccgaatttggtcccaagattgatgcttcaattgccgatggcatgatcgatatcgaacgatttgattttaaggcgttcaatgaaagccaagatttagcaacaaccatcgatcattatttcgacgtgcatggttattatcccgatgaaatcttagctgacacactttatcgtactcgcgagaatcgtcagctctgtcaacgactaggcattaggttgtcgggaccacgtttaggacgtaagcctaaaaagatggatgctaagcagcggcaagttgatcgtgacgcagagaagcggcgcgggaaaattgaacgcggttttgccttcatgaaaggccctttgggcctttcattggtgcggactaaaacggtagccagcatcgcagtgacgattgatattgcgatcaatctagccaatctaaagatgctactaaggctttttaatggaccaattttgatttttgtaaaatataagcaggaatccatcttaattcactatcaaattcacgtttcaggtagccggaatgttgcctaattcaccagccactaggtatcatttcgactgagctgatgctattcttcgttttggacggcgctgattttggagccggcatggcgacattctttgttggcgatgatctatccaagcgtcaacaaattatgaaggttaccggaccagtttggggcggtaatgagacttgggcggtcaccgcctttgcagtgatgtttgcggcttatccggggtggtactcagcgttaacatccggttattacccactcatcttccttatactgttctttctgatctttcgcggggtctcgtttgattatcgcaatcaatggcacagtcgccactacaatcgcttctgggactgggcacttttcattggcagtttaatgccaccattcctgttaggcattatctttagttccacagtaagcggcgtgccgattcgcaatggcttcgtctacgccagcatgggtgacattctgacgccattcagtatcctcggcggcattctggccgttctcttaagcctgaatgttggtttgaatcgggtcatcaaaaaagttaccgaaccggtagcaacaagtttgaccgttgcgttaaaacgaaccacttggatcctctatccagcgctcgtcttgtttgccatcttattgccgtttaacacgcagttctttaccaaccggcctgtcattgtcacgttactgctgattttactggtggccttcctcggtgttgaaacgtgggcaatcagccaacaacgacggcgtgtagccttttggcttagtgtcggcaccatggccagcttcatttacaccatttttctaggggtctttccaaccctgattgttggccgaacggcgggtacctccattacggcgttaacagcaacaagcggtccggtttctctgttatggacagcgtggttgttcggcttcacgattatcttgatggtgggtttgcaggcaacagcctatcacctaatcaataagtactaccacgagccggcatcgccaatgatatgagcggcggcgaaaagaaggtgcatatgatgaaaaagatctggatcaatatcttctgggggctgttagtcgtcagcttctggctctatcagctcttctggccattattctggaacccgatcagcaagttctatggcatggtggcgttgtacagcattgctgccattgctttcggttttgcagttcgggctacacttaaaggctatgggcgccagaaggcttgagtgttatgaacaaagaaaaccgctgcgacttcatgatcgcaacggtttttttgaatgctgatttggcgttggttattggctgacttgatcgctatctgaaggcgttaaaaaactcaggatgatcaagccgacaaaggtgattgaaatcccaagtgctggataaaaatagatgccaatagcagtgatgccaattgatagtgggaaaaagattgaggatagaaatttaaaaggaaacatctgcgcaattttttgactaacagcagtatgcacgtgttcaggtgtttttctaatggcatctgaaagccatagatacgataaactccaaaaaatgaagacaaacaaatatagatactccggtccagtagcttgtggaaacttcccgacccaaccagttgcgacaggcagtaaggacatgctaaaaagccacaagttgttaatccaataaaccttttttgatattctgagggctaaggcaaacatgtagtgatggttgtaccaagccaccccgacaaaaagaaagctgacaatataagcaaaaaaataaggtaattgatggataatacccgtccattttgcggtttccggggttttaaactcaagcaccataatggtaaggataatggctacgactgcgtctgtgaatgcttcaactcgacctttattcattttttcctctttatcgtaaactaagaatgattcgacaataagatcatttgatctgagtttactactgtttgtttctgaggacactttttaaaccccaaatatgggtctgaagaagcggacagataagcaagctcactaagcgtttttgagtttctggtgaaaaaagttttatctctcttaatatgaaaaaattgcgacatcatttgttggtgagtggcgcagtagcaaacgttcataaaggtatatttttcatcgcggtttcctactgttaataatgtgtgattttcgacttttagtcaaagccataaaattgaaaaagcatgcgttgggaaacaactgaaaaaggtcgaagctacgttagccaatcgacctttaagttgagaaacgtgaattattttatttgtgtttttcggagacttgaagactgactaaaagactattggagcataatgaaaacaaaggtattagaacaaatgcgtaccgtgatttcatcaaaaaaatcgttgcaaaacaaacagtcatgatcaagagactaccaacgtttgaaaaaagatacggttcatcacccttaatatgcttaataaagttagcatttccatagataagcaagaatatagggatcattaatagttcaggactgtgcaacataccgccgagaaaaaagagaatataaccaccattcagagacaaggcgatcttaccagtttgatcttcggaagtgtgttgagcccatagcagcatgcctaaaatagagaaacgcaaatacattttaaaagtaactttatcaagcaataaatcaccccgccaagaaaacgctttctaaacgataggatacacagagggaaacgacttgtcaatgtgttttaaaatcaatttataactataaaaatataattaatatataaatgaggcgatagttattgaatgtattgcttgtataaacacacctgaaatttaaaaagcgaatcaaaagtgaagcaattgttcagtgtgagaccgtcatttcatcggtgactgcttctacgttcatgtctgctggctcccgcgatggttgcaagcagaagcaggactgccgccgccaaagcaaaccaagtccaaccggcaatgggaacatgagcatctgccaaatagccaaagccatacatgataacaaggtggccgccagcaaggactagtgcagcgaacgtcatgctaaggcgctgccagattgtgacggcgttggtgaaccaagccgtgaccatgactagtatctgtgccagcagcaacaaaaccatgagcagctgtaaaattgaattgagataagccatcgtatttgtctcctgtaagcgtgccgtaaaggacagaccagtttcgtattgtggtgactatatcataccaacaaaaattcaagcttgatagtgttctgctacgtctcaattgcagataggtagcggggttggcatactatgagacattagcagccagcaaaaatatcacgcaaaaaaaagcctgtcagaggatcaactcactgacagactatttttctaaagcagacgtagaggagtgcgttcgttgaaaaaacaatatcaaccacgtgtggttatcctaattgttggggaagacttttaagatgatgtttatgcagacgcacgacaatcataataagcagaatcagtagcattattgaaatagccccacgttcaataccaaagacgccgccattcagccattgtgtattcgatgtcggtgtcgaggtgataaataagcggatggcaggaaagccggagacgactgtcccgaagataattccctccgaaaaatgccatgctgcattgatagcgctacacagccaaatattaccagagatcaatcgaatttcggacatcaaaacactgaataagaatagacttagtgcagcatagacatcaaatcctgcattaacgacatgtaaaaaaacatacaaaattgagtttgttaaaaaagcgaagacaacacgtttctttttaagccaataccccatcagatagccacggcatattaattcttcagcgattgcctgaatcgtatagccaatcaaaaagagaaaaaagacgggtagataagaccattgatagttgaagattagcttgtaaccacccaaaagtgtgatgatgccccagttaatgagaacagctgacaagccgattaatgaacctaacacacaagttttaaaagcgactttagttgaaaatttgatcatttgcaactggcttttatgacgttgccacatcaaataggcacctagaaattgagctacgaaacctattagtatgataaaacgcgtatccaacagtgttgctgtattcatggatagcaaaccaagcaacataccaactgcaagtgaaggcagaattccccagccaatcgctgtcagtgacaccgctatgatttctttaagcaaagttctgttatcgaccatatcctcaccataaaaaagagtcctgtataaagtctaatcttcatagaggattcttccctttcatgaaaaataagtaatattagtgacgtggaaaatttcgatgattgccttcgttaaacccagcgacaatatcatcaatgtggccaaatgcttcttgagctaggccaattccgatgtcaacccaacctttgcgtttgctgccaccggtcacggcagcgcaatcttgaagtgaaagcgtggaaaacatagttaatgatgtcatggaatacctccgattttttcagtatttggtagcaacagggaaacaccagatcagcaatgaccaggtccgccatatttatgtgcccggcagtaacctgcatcacctgctgcggcccaaatgatacttagttctttgccgacgccgcgccagaagtcacttgagccgtcccctccaactacgagttgaagctcttgcatacttaattcggttaaagataattgttttaccattttgtccctcctaatatttagtcttgcctaacttttgaaacgcagtaattcaaggagctagctgtcctaaaaacaagttacaatagtgcacagggattttggtgagttttatataaacgttggttattcgccgataaacgttagaaaatttgctaaaatgcgtaaaaagtgacgttaaaagctattttcatgacgttcagttttaagagaccgtgtccaatggctattaggagaggtagatgatcagcagcagtcttgatttagtcgagcgagtagtctctatcttgacaattgcgatacctgttatgtcgcgtgtgattgctagcgggtgtctcgaacaagcgaaatagtcactgataaacctccttaagtgccaaaaaaagaagtcacaaggaatgcgatcaaacattccttgtggcttcttttagataactcggtagtttttaggttggggtcgtggtttgatcccaagacgtgattaagggtgggtgtaaaaattaccggtggatataaacgtaactgcttgcaccagagatggtttgggtgttcgggccggttggtgagctgaagcccatgccgccttggctgatcgtgacactgtcaccagagacagattggacgtaagcaacgtgaccgtatgaaccatcggctgtccattgaccgccaacagattgaccagcggcgaagacgatgattgaaccggctgctggcgtgtggttgactgtgaaaccagcagctgcagcggaactaccccattgggcaccattgccccagccattaccagcccatgaagcgactgacttgacgtaccaggtgcactgaccccaaggatacgtgttgcctgaactgctgtaatcagcgtgactgccgctacctgaagtcgtgttgttgttgataatggaggaactgttgtttgaagaacttgatgtgttgttggcgatggtgctggttgaagttgcgctgcttgaactgctggtagtagaagaacttgcggttgaagcggcaacggtcttcaaagcggcttgggttgcagcagctgcttcagactgttcttgagcaaattggctttgcaaagcaaccaactcatctttatgatcagcaatttgcttattcaaagcatcttgtttatcgttagcatctttttgtagggaaaccaactgtgatttctgggtttccaatgaagccttagttgaaaccagcgtctgacgggcattttcctgttccgtcttcaagccagctaatttatccttggcaactgtcacggcatcaagcgcatctttgctggcttggctaagtttgccaaccgtcatggtgcgggcaattaagtcagacaagttctgggaattcagaacaaagtcgatatagacattgccgctgacagagttgccagcctttttttgcaaggagatcaactgatctttcaagttgttcttgcgtgctgtgacattcttttgagcggcaacaatttcaccgctgagtgatgaaatcttggcatcagttgcgctgatcttagccgttgcatcgctgatttgaccattcttggtatcgatctgcttgttcaaattgataacttctgtgttcgcatcttcaatttgcttcaacagtgcattggtttcgcttttgttggaagcgatactgtcgcttgtatcagcgaaaactggtgttacggcgctagcagaacctgctaaggtaactgcagcaaccaacgtgatcatgactttattgaatttcatttttgacctcacccttaatttgattaactaaaggctactttactgtgtcaatgttacgtcagcgttacagcactgttaggagttggtctcaatcttcatttgcgcttcaaaattgcgatcatgaacgtttttaatcccaatttttgatgaattttgtatgaaaaaagcagcgccgtgacgacgctgcctgacaaaattgtaagttattcgtttgatttcagggcttcgaccatgtccacccgttggagtcgacgatgcgtgagccaggtgacgacgccggtgaaggccaacatgagtaacgtggccgtgaggtagccgacaatgctgatcgtgagtgggaaaaccacggcctcggtttcggcttgatacaaaatgtaggctgtcagcaaattgccgagcagatagccgaacacgatgccgatcactgtcaacacaatgctctcgcgactgatgtacatggtgacctcgcgatcgaaaaagcccagcaccttgattgtggatagttcccgaatgcgttccgaaacgttgatgttattcagattgtacaagaccacgaatgacaaaaccgcactgagcagaataaaaatcaacacaataggatctaacataccgctcatattgcttaacgttttctttgctgtcgtcgtgaaactaatcccgacaatcgcgtgatgattgagcaattgcttagcgagtcgatcattttgtttgctgctttggggctgcaagcggactagcaaggtgtttggtttcgcactattaccagcgagctgttgataagcggtgttggagagatagccaaaatggccaacgtaattcttagcaatgcctttaattgtgaatcgcttgctctgaccattagttgtggcgactttaagggtatcgcccgttgtcacgttgagtgctttagccagtttgctggtgatcacgataccgtggcgcggcaaggtcagtttgcgatttgacgccgttgaacggagactgacataaggttcaagatcgttgccgtttgctggggcaaacaaattaacatcgctcaggctatggcctttagcactgagcttagccaccgcgctgctaaccgtgcccgcgctgcgataagctttgcttttagccagaatgtcgcgggccgcagctggctttttgccatcagccaatcgcacaatggcttgataatggatgacatcaccatactgttgaacaccagtagcagtgattgagtctttgatgccaaacccggtgaggatcaaggcggtgccgccagcaatcccaagaatggtcatcaccagccgtgatttgtatcggaaaagattacgatagctgactttttggttaaaagacagacgcgaccaaagcggcgtgatccgctccagcaaaatgcgtttggctgatttcggtgctcgcggccgcatcaaggcagccggcttttcggttagttcattgcggaccacaatggcggcggcccctaatgttgcgatcagcgccaataacaatgacaaggcgatcaacggccattgcaaagagacgacttgttggagcggaatgtaatttttatacaaactcaagacaatgcgcggaatgctcaagttgccagcaaaaaccccgatgatcccacctaataaaccagctaaggcagcataggcgaggtaattgcgcgcaatcgcccatttgccgtaaccaagcgccttgaatgtgccgatttgcgcgcgggcttcttcgaccatgcgactgaccgtggtgaaagtaatcagcgcagcgacaagaaagaagaaaactgggaaaacgttggcaatggcggcaattcgatcagcagagccgccgtaatcgccaaagccaggcagatcttcccgagtttgccatgtgaggctggttgacagttgtttgcgagctgtgacagtggcctgttgctgaaaggttgatagttgcggcttgatagcttgatcggcagctgcggcaacggcggctgccggcatgcctgacgccgctaattgtgcttgagctttggccgtagcggttttgacaatgttggcatataccgctgctcgcagatctttttcgccttgcgccttcacgcgctgtttcaccaatttcatttttgtggcaacggcgtccttgtaacggttgctgaaggtatcgcgtgtttgcaaagctgggaagcgaatgttgagctgcgaggcgaccggcatcttcatctgacttgctgggatgtaggcaaaataacgcacggtgccatcaccgatattcgctgacccacgactagtgtcttcgatgtaggctggcgaatcagcaaaaccgctaattttaaaagtacgtcgagcaagcttgctgccgccggtgaaggtgtaagtttgaccaagttgatagccgctttttttggctgccgtgtcgaggacaatctgattggcttgcgttggcagctgtccgctggtgagatgcagtcgattgatggttgtccctttttgatagccgtaaagggcaacaacatcgctggcgcggccgccgatgacatacttaaacttgacggcttctgcctgcacgccgctaactgattcagcggctttaacttgagccttactgacaccagtcgttgccagcaactgactatcagccagatgatcggctttcaccgtggtgtttagagaatccttaagtgccgggcccgtggccttgacgccgacgaacagcaggacacctagcatgataataatgacaatggcgataaaccggcccaaagagtcgcgaatgttacgccaaagatttttagttagtggtttcatgacgttactcacctaccactcaatgtctgcgacaggcgttggctgcggttcatcatgaatactgcgaacctgcgcatcattaatttcgatgatccggtcagccattttggcaatcgctgcattatgggtaatgatcatgacggttttatgatctttacgactggcatcctgtaacaactgcaagacttgtttgccggttcgataatccaaggcaccagttggttcatcacaaagcagcagcttcgggtttttcgccaacgcccgagcaatggccacccgttgttgctcaccgccagacagctgtgacggaaaattatctagtcgcgcacctaggccgacttgctttaaaacggttgtcggatccaaggcatctttgacaattgagccagccagttcaacattttcccttgttgtcaggttcggaatcagattgtaaaactggaacacgaagccaacattatgccggcgaaaagcggtcagttgacgatcagaaaaagtcgcaatatcggtgccgtcaatccatacctcgccttcagtgggggagtccatgccaccgaggatattgagcaaggttgatttaccggcaccgctgggaccaagaatcacggttaatttgccttgatcagccgtaaaattaatgtcgttatttgctgtaatgatggtttcgcccattttgtaacgttttgattcatgtttgacttcgatatatgccatgattgcctcctagcgtggatggtgagcaatgtgtgaagttcttagacgcgttcacaggcccagaaacctgcacataaggacctaaggcgcaatggccaaagcccggccatcacgcctgaggccacttacattccggtttctaaccgcgcctgttcacgctcttcaacacattgtccatttcataacattatgttagatttaaaccggccgttcaaggacagaaatggtcgttttgtttttaaatggacaacttgttcaaatgatgttcggaggatgacgatgtcggggacgaaggataatcggcgggttcagtatacgatggaccgatttaaagacgctttgttgcatattttggcgacgaaaccgttggacgaggtcacggtgactgagctttgtcgacaggcagatttgaatcgcgggacgttttacttacattttcaatctccacgcgatttgttcgaacgcattgaaatggatttggtcgaggcaattcggccttatctaacggttaaaataaacgatatggccacatggttggtgccgattttaaatgtcattgccaatcagccgcaagcagcagcgattattttgaataatcctgatagcgtggtgttgaagaagataacggatccaattcgacaaaaaacagaaaccagctatcaatcgtggtatggtgagaccgacaaaagtgttctcacttactactacgcgttcttcattgacggggcaattggcgtgctgacaaaatggttgaaaaatggcacggttgagcgttctgaaaagattgcggcggtgatcgaaaatgtcgtgactaaaggcgcaccgcattaaattatagcaagtgaaattagacaaataatataggggaattagcatgcagaatgtaaaattaattgcgagtgacatggaccagactttactgacaagtgcagggaccttgccgccgcactttgatcgctatcttcatcgccttggcgaggctgggattgagtttgccgtggccagtgggcggccgctttatacgctacaagaaactttcccacactttagtgaccaaatttcgatggtctgcgataacggcggcctcgtttattcgcacggccaattaattggtaaaagcctgatccctgaggaaaaatatcgcctcaattttcaagtcaagtgcaacgatgataacgaattcttgatagtggtctaggctgttacgccatgcatcggtagtaatcgcatgggcgaagatagttcagaatacgtctgggacgatggttcagtgcggattggactgcttgaatttcaaccagggtaattgctctgagagacttccctttcgggaagaattccctaagcagtccattggcgttctcgtttgtgccacgctcccaaggcgagtacggatgtgcgaagtaaatctgggttccaacaatctctgataacttggcaaactcggaaccattgtcaaaagtgatactctcaaattccttggccccgtagtcgtcgatcgtgtcctgcaaggctttaaggcaggtgcccgcatgatagtcaggaatcttgacgatgatctcagtccggctgtaccgttctgtgagcgtcattaatgctggctcatcagctaagcgaatacctttgaccaagtcgccttcccaatgtcccacgcctgtgcggtcattcacggccgcaggacgcaactcgattgagtcgccgtatatcttcttattcttgcgcttgtgggcgttcttatagcctttgatgcggcgtcggagcttcttgggaagtgtcatgttgtctagctcaagcagcccggcgtcgatgtagcgatagacagttgtcgttgaagggcaagccttgccctggtcgcgatagaagtgtacgaagctatcaacgctgtgtacgcgcggcttacgagtaagctccctggcgagagccttgaagaacgcacggccggtcttaagaaaggcgtagtgaccggttctatcgcgtttacggtcgtgcatggcttgggcagtttccgcaagatagacttgatgcgagtgacgcttcgagtcgagctgagttacagatccacgcgtgatttctcgtgagattgtcgctttactgcgatgaagcttctgtgcaatcacggtcgcggtgtcaccagcagcctgaagggcctgaattgtagcacggtcgctaaaactgagttgttggtaatgcttgtgggtgttagtctgagagtgggtcatgaagattcctgctttcttgtttagctagcactaacaagaataggtcttcatggcctttatggtctagtcgtcagggtgttgcacttgaattgtaaactggggaggaaaaatatcgtgagatcgtgcaatttatcatgacgaaaacagacggtgttcctgtcctgtgtgccttggatgccgcgtatattaatgctactgatgcccaatattcaccagctcttttgccgttttatcaccaattgaaaaaggtgccggatttgttaacgcagtcgctggcagttgataaggtgacgatttattttccaaataaagacacccgcaaaaattccgaacgttatttccgcccagtatttggcaaggattataccgttcaagtcagcggtgagacttggctagatattcagaacctcggcgtgaacaagggccgcggtatgcggattttgagtcgtcattttgatattcctacgacacaaatgatggcgtttggcgattatgataatgatattccaatgctcgaaacggttggctacagttacatcatggccaatgcaacgcaaggcatggcgcaacatgccaaatatcgcacgcggagtaacgatgaattcggcgtcttgcatgtgatggatcaagtgttacaagcgcaagagggctaggctaatggcagttatctcaatacgtgtggcaattggtgtatacggctttttgatgttactaacggcgtggcaagcatggcagacaaaacaaggggatgttcgcttagaccaactgacggctttagctgcggccttagtgatgactgcggcagttatccccgataagttcagtgcgctcaccgttttattgattgggttattggctttgtccgcggtgacatggttcaatggcgttgcggtatacggtaaaccgcatgtgaatcatcacatcatcagattactggtccatcttgttttgttttgtttgggttagcggtgtggctgttctgagtagcgaaatcagataaaaggttggttgttgaatcaagttttttggtagctagttgctgatagatcatacataatgggcagaagaaccttagacaacttctaaaaattttggttcaacagcctcattgttttttatgattgtcggttgttatttgtctttttaaaagaactgaatcatacaatgccttcagatgttagaaatctaatgaaaagtgagtgaaaaatgtgactttggcagcgaattggattgttgtgatcttttcattactttttgtaagtctcggtttgtcagcttatacgtattacttaagatataggtttaaatacgatcctatgagtttaaggcgggcttttaagagtgatgctaccagcccttatcgatttggagaaagcagcaatcctcaaataagtgtgttggcacattgggcaaagatcgttctagttggttacgctttaagtgccgttgctacgttaggcttccttatgatcattcttacagaaactatttccaccggtacgatagacaattcattgttggctattggcgtcttctcctttactattgttttgggcattgtatcctatgtaatcaaccaaaaaaagttgatgctccagatgaaggagtaccaacttttaaaaaagacagaagagatttctaaaacaataagggaattttttgaagggcaaacaccttcaattggcttgagaatactaaatctaggtagtggctggtgaattaggcaacattccggctacctgaaacgtgaatttgatagtgaattaagatggattcctgcttatattttacaaaaatcaaaattggtccattaaaaagccttagtagcatctttagattggctagattgatcgcaatatcaatcgtcactgcgatgctggctaccgttttagtccgcaccaatgaaaggcccaaagggcctttcatgaaggcaaaaccgcgttcaattttcccgcgccgcttctctgcgtcacgatcaacttgccgctgcttagcatccatctttttaggcttacgtcctaaacgtggtcccgacaacctaatgcctagtcgttgacagagctgacgattctcgcgagtacgataaagtgtgtcagctaagatttcatcgggataataaccatgcacgtcgaaataatgatcgatggttgttgctaaatcttggctttcattgaacgccttaaaatcaaatcgttcgatatcgatcatgccatcggcaattgaagcatcaatcttgggaccaaattcggttcgttgtttggctttaccacggttaatcgggcgaatccacggttgtgccaagctaacaatccgtcctgggacccgatgggtccgattttcatacatgaacatttgctggtcaaaaagttcacgaatcacagccaatcgtttggtttgcctttcgttaagagaggcaccgtgggccaacagcacatcgatataacgtagatcacgtcggacatactggagctgtactttgatctgcttgcgtgtttccttagcccaacgccgcggttttctagcaaaagcggtccacttagcttttgcttcacgtttgtaggttcgtggaggcttgatttgcaactgatgagccatgtctaataacatttcttctagattgagccgagcttgatttagcagcgaagtatcttgtggaaaacgaatttcaattggcaccgcagtagcgtctgtgatcaagacacggagctcatcatctggcaataagctttggatttgttcgcgcaaggtatcactgatgatatttcgcactagttccgttatttgacccatgcgtcgtctaaaataaaccaaggttgagtggttgaacggcaggtcggttgtgtaggtgtctagcccgataaagtactggtaagccggggtatcacgaatagcggtaacgaccgaacggtcggttagatgttctgcttgcttgatcaaactggcaccgtaaagcagacgaaagggtttagcagcgcgcccacccatctcagtaaaaagaagttgataggcttcatcgagctgttgccacgggagcatgtcggctaattgaacccactcattgtcggaagaaagtggcacaccaaggccgttgttaaaggattgaaatgacaattgggtagcacgatgtcgataagccatgatggtttcctccaggaaaaataaaaagtgcaaggaaaacaggcgttagcccatgtttactttgcactaattataatctttactattctttgatgccaataaagcttgcagttatgctgctttcaccagccactaggtatcattaatttagttttctttgaatcagattttaagccttgttttaggatgcttttgaacgatccgttagagtataatctaacggatcaatttttgaaggtttatcagttagtaatcattgagccacaagctgtagccatgttgtcaatatcgcagtcccaatcattaacagtatcttgctgagaatccagcgtttctctcctgcagtattctccactagagaaatattagacaaaggagaagccaacaattttttgtgccgaaattctagcatcatctgcacaatggttaaaataacaaacaagacaattgatgtccacaaaatcattacacggacactgtcgtccaaagaaattatcagaaaatcgtttattgaatagactatccagccgcctaagaaaaacaccaatgataaaatctttgttgtgctttccaatttgaccaattggtttaccttcttaaataaagttggattttcacccagatatttagctacttctatataggcttcactacgcttttgatgcgcagcttgtcgccgtaccagtgttgttaaaaaaagagaacttaataacactgtgaatccaagcacaccaagcattaattgtaacaactccaattaatcacctccttaaaagctaagcagcaatgaatgtcgctggtaatagtttagcagccgttccaacaagcgtagccgctacttctggagccataataattgttgctattaatacaacagctcctgccgcccaaggaatccactccaggtttggttcatgttcagaaacgggaacataaattggtttataatcctcagctgggatccccaatccatttggtttagtgtatatctcaatactcaatgaggttgtaacattttcctgttggccgttagtaacaactgttgttgtagactcacagaccactttaaaccccaacattccatttttagttgacattccaacctttagatttccattgccaatcattggccccagtgtaccaagcaaagccgtaaagtcaaaattccttgcagcttcgtgcgcctctttgaatttatcgatctcagattgtacttgagtgcctaatttgccattagaaattgtaaaacctagtggagccccactgtcgttgctcgcaaaagtacttgatagtttaatataaaactctgccaaaatagttgacacatgaatttcagggccatcaacctctaaggtcggaatatctggttgtaatggttttaactgataggcattattaattaaggtgcgggcaaattcaaggcgtactgcgttaggatctactttaaaagttccacttccttggtctttccctgaagaagctacttggtcaatatcaacacctgcagctgagtattccacaaactgatcaaaggcccaatttttgggcattttaaaacctaggtttccgctccagccatatgacatatcagcgacgtaggaataaagaatattggttccagatgcagcggttacccgattacatacattccgtgttccatatattccaattttgaaaatactattgttcatagcttggctaataccacggaaataaggaataattgtgccatctatatcgccactttgaacatccacatcaactgcaaagtaaatcgtagttgcagccgaaaaccctaacttagcagcagtactacttgcaacaaatccgtcatgaattccctgctgtagactaaagtaatcaagctcatagccaccatcttcatatattggcacaacttttagtccagcctcagtaagatttgcaagttccgtggaagtcaagtatttatcacgttcggcagcccctgcaccaacgctgccagttagataacgagcaactattgaaaaatcgaattgctttagttgttttgcctgtgcagcacttaattgagttgctgtatcaaaagtatttgaatcacgattagtattgccgttgctagtcaacaatcctttgatgacggttaggtcagctgtgctattaaatggcggtaaattcataaactttcgaaaagctaccactgccgttgctacgtctgaactaaaatagccatcaaatgcccctgtataaaagccgttcacatacaagccgtattggatgacctggacaacgtcgctattggctccctgattaacagtaggtgtagcggcaattgtccctggaccatagttaccatttgcttgcgcagaactcataccgattgctcgttgtaaggcataaatcaacgctgtattagttgctcgttgataaacgccatcacacggcatcaattcttgtaattccccagagaatttacggttgagcgcttgctgcatggttcgaaccttagcatcgccgcttgaaactaagacgaaagctgccatgtcaaacaaagccgccataaatgccactgtcacagagccatcagccgcaatgccagcatcttgctgaagttctttaacagcattaagggtattattcgtgaactcattattaaagtctactggactaattcctttgcaccagaaagccccttgaatgagttgagcaatgttccccttatatcctggtttcagactacctacaacaggtgctaaagcatttttggtcgtatcgccaaagccttcaccaatagcactaataccgatttcgtgctgtaatcccattctcaggctataaattgttggccaacctgtttgtccgttttctggagctgcgacaaagccaggaacactaccatacgttttgttgagccatttttgaacggctcgtactgcttcatctgccattttaaagtctcctttattatcaatgtgtgcaacacgtctgttgcagtataacgaacatgtgttcggtatcattctgcatccattccattcttttttgcaaggaaatgtttttgtttttgggaggaagaccgtctgctcttgacgctcgatattatctcggaaaggctttgtaaaaaattgctgtgaattgctaaaaatattgaaatagagtgggtcatcaaaaaggctaaggctgcgatgatgaatcgcaacagttggaccggcaggcggcgggcgatgatggggccgatatagccaccgatgaacagaccgataccaagcgggatgaccatgagccattcaattttggtggtgaaggcgtagatgacggtggcgatggcattggcggcgaatccggtcagattcttcatagaattggagacgatgaatggttgatcaacggtcaaggttaaggttgccagcatgaccacacccgcagcggccccgaaatagccagcataggcgccagtaacaaaaatgacgatggtttgagcggcttcttgtccaaatgttaaggtgcgtgcaggttctccgggacgatgttcttgagttggcagtcggccgctgaagagtagtaacaggcccgcggcaatgatgaagaaaggcacaactttttcaaatgtggctgccggggcgatcagcaacaaggcactgccaaaaatactaccaagtgataccagtaagatcagccgccagagaaatttaccgcggccacggagctctggcagtgaggatacagccgagccaaccccagtgaaaacgagtgccgcggtatttgtgacgttagcaatgaccggcggcacgccaattgcaagcaaggcggggtacgaaaccagtgaagccaagccagctaaagtagacgttaacccagcaccgatcccggcaatcagtagaaaggcaaagatcgaaaaattcatattgctcctccaagaatttgaatggacgtcatctagcgcatctagaaatgccatgtgtcaggtcgtactgtgaccatggggatgcgacacacaggtcttttacgctagcgaacgttgataggtcaatcatacgctaaagaacagtcatttggggttatgataaaaagcgaagaagggacagatgtacatgtttgaaaatagtaagagtcgacttgatgccatttccgacggcgtttttgcggttgtgctgacattaatggtgttggacatcaaggtgcctaaaacactgaccatggcagatctttatgcgacgggcttctctgtcgtcatttactttatcagttttgcggtggtcggccaatactggacatttcaccaagaactactacataccgttacgcaaccgagcactaatttcttagtattaaattttttctatcttgtgttcatctgtttagtgccatttgcgaccagtttcatcggtgaccatccaggcagtcggatcagtgcaacattatttgccatcattatttttatggtcgatttgtttcaatttattttgttccgatccgtcattggcgaacaaccaaaaaaggaaaacctaaatgcccatgattgggaggaatatcgcgcggtatcactcatggtgctcgttgccgttgtttacattcttgtgggcttgctgctgccgaagtggattctcgttgtgattgccctcggtttaggagcacgaaccttgaataatacaatcggacgccggcttcagcgccaaagcaaagctaagtaaaggcgaataatttttcgcataatgggaaacgttcttttctttcccatgaatgacctagtgagctttaaagaccccagtgccatgccggagattgcggagtttggcacggctgagttagattgttcaatttttccgaatgtaccgattaagcagcaatcccaatgcgatccacaagatggccgcgatgataatcgtgataatccagccgagtggttcgtgggcgaatggcaggggcacgttcatgccaaaaaagccggaaacgatggtcggcacggtgagcaaaatcgaccatactgtcatgaatcgcatgatgtcattcaagttattattcaaaacggtgttgtagctgtccgttaagtgatccaaggtgtgggaagataagttcatcatttccgcaatctgatcggcttcaatgatgacatcctccagttgttccccttgtgtgccagtgatgccaggcacacgggttgacgcgtggatctgtttcaaaacagcagcattttggattgttgctcgaaccaaaaaatcagcgctcaaggcaagttcggcgattttcaacaagtcttttttggtcgtgtgttcacgtaagcgtgtggcaatttgacgacgagtggcgtcttgctgcttcaccagtgtgacaaaattatcggtgatagcaagcaggcattgccacaaaaggctgtacaccgattcgctgccaaatcgcgcaaccgttttggcgatggcggcattggtattgttcacatcatggctgccaactgtgatgaggcggtcatcggtgacgagaaaagccatgggttcagaaaggtagccatcggtatcaggtttatcgctaggcacattataaatcagcagaaaagtgtcactctctgcatcgtattccatatgcggttgctcgtaatcgtcacgggcgtatcccagcatttcatcggtgataccaaaatcaatttgtaattgtgtcagtcctgacgcatcgtcgcgcgtgaccggacgccaggtttcagtaggggttggcattagcaaaagtccttttcaaaacagaagtgagcggtaagcagcaggtggctagttcggcgataaggccttgatagcggcggtgatcgcgtgattgacggtattggcgtccaaaggttggtcaaaatacaagaagcctaaaatcaagccaccggtcatcgaccacattgttcgcagaatatcttcaagcggccaatcaacaatcaaaccgcgctttaccatcgcgttcaggtcatgtgtcatggattcccaatattgggtggtgaaaccatcaacgacctgagcccgcacctgcgtatcattcagtaattccgacagtacaattttgatgatctgggcattatcttttaaaaaagtcacgcgatcctttattaacaccgtcaagaaagtttccaatgagacatagtcctgatggaggcgagacttaatgaaatcgtccaactcatcagggaacatttgactcagcaccggtgcgatgatggcattgagcaagccgcgtttattggtaaagcggctgtaaatattcccctcggccaccccagctcgcaaagcaatttctttggtactggccgcggcgtatcctttttcagcaaaaacctcaatggccgcgatgatgatgagtttctgcttagcggtgaaattggtaaaaaattgcgtctgatgcaagatgttgtctgctgagctggccatacgtcaggatcccttctcatgggtttgagtgaaaacttaaagtcaacaagttggtcccattatagcacgcagcctgttgcctcaatagcgattttggcgaataagttaagcaagcctaacctttttcttgacctgtatccaaaagggtgtatatttatgtcggacgatgttgagtaaatactcaaattagacccaaatttcaagccaatggaaagagggcttcacacaatggcatcagaagataaaaaatcaaaacgcgaacacattattcacttctaagatacgccaagcaaaagtcttgatgaggtgaatggcagtgttgaagtaccgcacaatgcgggcttttggaaaactttagcagcttacactggcccaggcatcctagttgccgttgggtatatggatcctggtaactggatcaccagtattgccggtggcgcttcatttaaatattccttgctatctgtcattcttatttccagtctgattgcaatgctgctgcaagccatggcggctcgtcttggtattgtgaccggcagagatttagcgcagatgacacgtgatcacaccagcaaagcgatgggcggttttctttgggtcattacagaacttgcgattatggcgactgatatcgccgaaatcattggctctgccattgccttgaagttactgttcaacatgccgctgattgtcggcatcattatcacgaccgctgatgtgctgatcctcttactgctcatgcgcctcggtttccgtaagattgaggcggttgttgcgaccttagtgctggttatcttattggttttcgcttatgaagtgattctcgcgcaaccaaatgtcccagaactgttgaaaggctatctgccacacgcggatatcgtgaccaacaaatcaatgctctatctctctttggggattgttggtgccacggtgatgccgcatgacctgttcctcggctcctcgatttcgcaaacacgaaaaattgatcgcacgaagcacgaagaagtcaaaaaggcgattaagttctccaccattgattccaacctgcaactgaccatggccttcattgtgaactcactgctgctgattctgggcgcagcgctgttcttcggcacaagtagctcagttggccgcttcgttgatcttttcaacgcactaagcaattctcagatcgtcggtgcgatcgccagcccgatgctttccatgttgttcgcggttgcgctgctcgcatccggccaaagctccacgattacaggaacacttgccggtcagattatcatggaaggcttcattcatttgaaaatgccgctctgggcccaacgacttttgactcggctcatgtccgtgaccccagtgctcatcttcgcgatttactaccatggcaacgaagccaaaatcgaaaacctgttgaccttctcgcaggtcttcctcagtatcgcattaccattcgccgtcatcccgctagtgctctacactagtgataaaaaaatcatgggtgagttcgccaaccgtgcttgggtgaagtggacagcatggttcatcagtggggtcctgatcattttgaacctttacctgattgcgcagacgttaggatttgttaaataagtcattgtagcaagcaaaagccgctcgattcgctgatcgagcggcttttagtgtcgatttatttaaaaaggggacagttgactcatcaaatttcggcgtaagggcagcgagtgttattggcgctgatgtcctagtatatagtagctgaaccagagccatagtcattgtgataacagcaagtattgccgtcacgaaggagagtggacctgcgttcaattgacatcagttataccaagtcatggtggcaaagctcaaaccaaatgtctgaacagcgtaacgattcggccgggcactcgtcattttgagttcttcgtgggaaaccggtgaaggcttaacgtaatagacagtgccatcattgtcatgactatacgcaggagcataagcattttcggatgaccgctcgatccttgcacaaaaggcactttgaaagtgtccatgcatcaaaagctgcgttctgactgccagtgttggtgttaggtgaccgagcacaaagaggccaatgatggtgccgatgattagtttaagtacttggttcgacgaaggtttagtataggaagaaacgctcatttcttgaaccgaaaagagagctttatgagcttaaatcttcctcataagccccttaagctaagtcgctatttgatcttagctctcaattgacttttgacatgccattaatttatcaagtgtctctgtatacttttttctgtccgctgcattgaggccattgaaaacggtgatggggacagaagtattgtacttttgaattaggttagaaatatctttgactaactctgccagaacattactagacttagtgttttcgtaatatccacgttttggagaaaccaaacgaccggttgtccgaagtcgccgtaatacgccagcgatttgtccgtcagaaaattcttctttaaaagcagtgtaaatttcttccgctttaacaatacggtgcttttctccaacaaattttgtgatctgagacgctaaattattggattccattttgattttcccccttgcgactaaaaagccagaagtataattcatgctacgaaccgattttatccccatatgttcaacatgtcaaacgtttaaacaaacaacaatatcgattaaaccgtaaaatgccaaacattccaaaaatggccatctaacttaccacgttcgccactctcttttacttttcagcatcattagtacgaaccagtgctatcataaagtcatctgaaaggaagcgtggctatggatcagtttgtgaatcacttgagttgtacagcgttgcttgttggtaagaaggcgtcagttgatggatcgacgatgattgcgcgaaatgaggatgctagcggtgggatcaatccgaagcgtttcattgttgtgcagccgactgatcagccgcaacggtatgtatcgacattcaatgggtttcagttggatttaccgcaaacaccgttgcagtatacttgcacgccggttgctgatcaaagtcatgggacttggggtgaagctggtatcaacagcgagaatgtggcgatgagtgcaactgaaactgagttcacaaacaccacaatgctgggattggacccgcttgagccggacggtattggtgaagaggccatgttgacggtggtattgccttatattcacaacgctcgcgaaggtgtcgaacgcctgggcgagttggtcaccaagtatggtacctgcgaaagtaatgggatcgccttttctgatgctaacgaaatctggtattttgaaacagttggcggccatcactgggcggcggaacggattcctgatgatcgttatgtgctggctccgaatcaaactggtattcaggagattgattttcaggcaccggaacattacaagtacagtgctgatctcaaagactttgcagctaagtatcatttgaataaagcaaagcaagggttcaattttcgagacattttcggtgaagatacgcaggccgatcactattacaatacgccgcgggtctggtatgcccagaaaatgctgaatcctgaaattgatcaagatcctgaaagccgaacgatgccgtttagtcgtgtcccgagtcacttgatttcagtcgaagatgtagcgatggtattgagcagtcattaccaagccaccgactttgatccttacgggcagaccggcacgcctgagacgcggcggcgctatcgtccgattggcatgaatcgcaatcaagaaatgcatattctacaaattcggccaaatatgccgaagagtcatgctgccattcactggcttgcggaaggcgttaatattttcaacagcccggtaccatttttcgccaattgcacaacgacaccggagaatttccagtacacgccgattgataaaagttcaaccgatagcttctattggctcaacaagctaatcgctatggtggctgatccgttgtttgcagaacatgactgggatgccgagttcgccgtatctgaaagtcgcaagtttggtttcgctgccggccgtgccgctgtggccaaaggggatgcggcttttgccgatgtcaaaccagaagatctgccagcgtggcatgatgcgttgaacgccgaaacggcagcgacgatcacgaatgacctacaatacctcttacaccagctggtttgcatccgcgcggagaaaatgacaccaagctttgaaaaaggcggggaactttaatcggactgcgaacttagcgcaggtgcgaccggtaaaagaagcagtatgtcaaaaaaataaacgctcagtcctactgacggattttcatcagcggggctgggcgtttataataggcaatatgcttttgacaagtatattgacagaaagaaggtcatcgcattaaaaatacgaaaacggaacgctggatcggtttgatggttggcttagttctgaacgctgccggaaatggcctttgtattgttggggctatgggtagtggcttatggacggcggccgccattaacttgaatgactggcaagggtggaatattggcgcggtactgtttacctttggggtactgaacgcgctatcgaatctgttgttaattcggcgctgggattggccgcggttgatcggcgaagtgatttatacactgttcttcagctattttgtcaatgtctttacttggctattcacatggctgggacttggcaactggccaatggtggcgcgcattttcgtctcctgcttcggggtcttctgtttttgtgtagcaatttcgctctatcaacgcgccaacatcatcatgcatccaaacgatgacaccaccaatatcctgagatttctctattttaagggcaacgccactgcttcccagattactgattttatccccccaatcatcgtgatcgtagttgcgtggatcgcgacaggtaagctcttaggcatcaatatcgcgacattgttctcatttctcggcaacggcatcatcattgcatgggcagacgagcatgtttggccgcggttggtacataactttaaggtgaagcctagtggagcgaaaagatgataccaactgaaagttatgacaccaaagaagcgagcagcaagcgaacaagttagtctaaataactgttgtgagttaacatatttcccagattggtgccaaatggtttaattttaatcaaaataggttccaagtcgtcgtaaaattttgatgcgatgggcgttaagccgtttttcatcgcctcttgttgcagactcacaatgacttggttgaccacagcaacatcatatcgtttcttttctaaatcagctttggccatcagtccaatttttcgttcacgatctgaaatatcaggattcagaacgaaatcatataagttactcaatatggtttgatcgtcaatctcggcttttcctctaaccatgattagtcactcctaacgcttagtagtaaatactatctgtacaacatattaataattgtgaaatttcattgctaataattaagccatatctttatatcaacgcgagtgtactagtatataataaatatgtaaagtgtgaagcgttcagagatggtgggaggcattattgtgacgaaaatgacgagtaagaatcgccttgtgctcattacagttgtggtaatcatcgttgttttgggtatcgctaagcttatatctgatcaggttttcaatgtgcttattttcctactcgttgcatttgctgttttgtacccagtttatctgatattcaaaagtaatcattatttaagacgcaaatagggctataagcatggcatattaaaagaaggttccgcagacaatcaagtcggctgcggaaccttcttttagtacatggttgatcgaatttaaacttaccgtgattttcgtgctgatgactgtaaaccagtcgattaaaagaaaatcttgggtaaataatacggcgttactgaacttgggatgccgttggtgacggctaggaaggtgaaaccatacaccaccatcaggaacataactagcataaacaagtagcattctttttgtcgctgcaagatggttggcgaagtccatagtaagtcttcgggtcgatggctgtcatcttcaatgagcgccagtaagcgggaatattgataccaccacgtcatgacaccaaaggaccccacgatgcttgccaaaatcagcagcaaattccgcgagccatctgattggcttaaggcccagaggcgagtcatgccaacgggaacgagattgaaaagcaatccaaactgaatacttactgcaccgacaaaaagtgtcgccgttatgatcaagaagatgcgcgaaataattcgcaatattctgagtagcagatgccgtgcgtaaattgttttcttataaaaaacacgcgcatggtagatttgttctcgggtcatctgcggaagtctttcctgctgaaaggaaatggctttctcatcttcgactcgaatgattcgtgctggcacaaagaaaattgcgaagatgactaatatgactatcagacgcaacatgaggaatcctttctgaagttaattttgggcaattatcttagatagcttgatttaagaaaaaacaaacgttttcctttgtgaaatggtgacattgctaagattgcttaacgcagcttaactaagcatgaaatgtgatacgtaccgtatggattttctgtaggttttagtataccgttaagcaagtattacgtgatgtcagtatgagattaagaggcatctaaagtcccactcaacaaaatggaagttcttttgtttaatgtacccaatatttaattgtgaacaggccgaatggcaacgggatgccaccgtgtctttagctcatgtatagaaaacgactggagaaaggaattacaatatatggatgtctatatgcctttcattggaatggtttttatctggctactatcgtctgcaattgtttcaattagtagggaaaaacaaaaaaatgccttgctgcgagaaggaaaatatacaagtgaaagttatttagaaactaggaagcaaatgcaaagatttaccacagatgagtcaaatcatctctttaatcatatttacaacattgttattgtctggtactttttcatcgttgccttctcattaggtgcgataacgaccaacttttcaagtgctgcagttatctatttaattgatacagtattcttcttctcttttgctatctttaactttggtgcatcctattatacacaaaagataagaagaaaaatgaatagtgagttgccggaacttacctttgtagcgaaagcgctaattttaatttttcgagactttggcactgcattaatatttttgatttcttacttgagggcatagtttgctataaaagtgtaagtcacatttcaattagacatctacgggaaaccattgacgtttatacttccgacaatatgaattaacatttttagaaatactgttggcgtatatgcagaaagatcatataccttgaatgatttagggaggaaaaatggactatatttatttcgtaccgcatttgctcgtgatgataatttttgccgtcacgctcagaattaagagtgagttgtttaaaaaagaacgaatagaaaggaaagatgcattaaaaaagattggtgctgtagacaccgttgatcttgaaggtaatgatgataatagcttaaacgtaatcattggtcgtaatctgtatactgaaaaaatgatgaattctcagatgatcggaagctatctggcagtcactttcttttctgcaggggttatctatggtaacccatcttccgggctccttcttcttcccagtattggctttttttcttttttgcgaacgtgatctttcttggtgaggagcaagtatttcgcctcattaaacagaaaaggcttggaaaattcctggagaattttccaagcttaatgcgtgttcagaagaccggttcgaggtggtattacctctatcttttattgcttgtcgtagttgggggactcaattttgccatattctatgctgctgcagttctcttctactaaaaaatctggccaatgatgcggcattggtctcatttggttttgtgagcttgatcaaactttcatttccattagatttaagttgcaacccgcttagtaaatagtacactaacattaatatactaatgacggagggaccaagatgaatgatgagctgacgattcgaagcggcattcgcgatgttatgccgacggtgtttgggtatattactgttgggatggcctacgggattgtggcgaagaccgggcatttatccctgctcatgatcgggttgatgtccctgatcgtgtatgcgggatcagctcaatttgtgttggtgagcatgttggcgacaggtagtccgattggggcaatggttatttcgacggtgttgatcaatgcgcggatgagtttgatgtcaatgacggtggcgccatacttgaaagacgaatcaatgacgcagaatgtgctgattggaaccttgttaaccgatgaaagttttgcgttgtcgatgaacaaactcaattacactgatcatcacttgaatgccccgtggtttcatagtgtgaacgttggcgcttatttagtttggtttgtggccagtttactaggcgcgttgattggtgggctgattcctaatccagacggttttgggttggattttgccgttgtggccatgtttatcgggctattgtacttacaaatgatcacggatcggtccaaaccgtttttgcggcatctgagcgtcgctggggtggtggccgcggcgatggtggtgttggtgcggtatttgccagggacgacagcgattatcgtggcgacagtgattggttgtttgtttggaatgggggtggaacgccatgcagaatcctgaaacctttgcggcaatcctgagttgcggtttggcgacttggctgttgcgggtcgtgccgattgtcttggtcaagcggatgacgatccccaaatggctgctccattttctcagttttgtgccggtggcgattctttcggccatctttgttgaaagcctgctagtgattcatcccggacaatggccaagcgtcaactggtcgaacctattggcatcacttccggccattgtggttgccattatcacgaagagcctcttcgccgttgtggtcgcaggcgttgcttcgatggcaattttgcggctgctgggctgggcgtaggactggaactataagacgaaggcaataggctataagtccttcaagcgttttaacgttgactaaaaatcgctagtctggtgcgctagggtaagatcgcccgattgtgtttgctaatcacaattttgcggtctttttactgttcataaagtaaagaacagtatatccaaaggaaaaaggatacactgttcttgtcgattggggcggacatgtcatgacgcaagccgtttatcaaaccgtttacaatgaaatcacccttagaatctgcaaacatacgagtactagcatgccaagtagcgcgatcaaaaagacgagcgaccctaccttggcagctttaagtctaaaatattcgtagatgaggtaagtgatgagagagaacgggatgacaaaaacccatatcatctctagaacaggcgatcttttagggagtagatagggcatgaaaattacatagaaaccgatccagaacgtttgaaatctgaggacatgttgatagcgcttcttgaacaaggcagtccctttttcattcattcaaatcgcctcgtttttggttaagcacgacaaatgcagagatgcacaatttgagacgttgcagtgagcctacaaccaattttattataagctgggataattgattaggtcaacaattgggctttctggataatctcccacctaaaagcaattttaagcatgaagatggaatcggtatactcgtcaaattgacataggcaaggatcagtttgattttttgaggcgggtgctttttatgatcgcaatagctgagtgtcagcaattaaatacaagatcattgcttggtaggcacacatggaagacgctagaatcaatcgtatgactgagtgtttgcgtggtcttttagcgatttttaatgtagagaaacaacccagcctatgacaatgacggaaatgagatagaaaatctgcagaacgattgcaccgggtatccatccattaagcgcgatgaaatccaaggttgaacgccttttcgtgaaaagataaacggcagggatcagcccgaaaataggcacaacaaatgcaacgattaacaatacgattaaccatattttttcaatatttgtcatgatgaatcgctccatatagccatctagcgataagtcgaaataatcttatgggcatgattttagcacgaatcaactcgcagtctcttcagtagagatcagatgcgagaccaccagtatcaactcacgctagaacaacgtactgctctttttgacatggaggggatggcacaaaacaagtttgtgtctggcgtaccgtcgtgctagtgctgggtagcggcagatgatggcacttaagttgaatgacgttgtcagtcatcacaaataaacaggcagcgccatcgcgaactgaaaaagttcatgatagcggtgcctgttttctggtgatgatcaaacttaacagccgaatttaaaaaccggcgatagtcgtaccgtataacttccccttctgtttctgtaacagacttagaacccagaagcttagggccaagtataacccgatagttagccaactggcttcgacgccaaaagtgccgccagtaatgaatgggctcaaaccggtattcgttgacttcaagatcatgcctgaatcagataatccggggacagtcacaccaaacaacctgctttccgcgaagttccaagcggcgtggaaggcgccacagaaccaaatgttgccggtaattaatcggatttctgacaagagcatgccgaaaagaaaaatgcccaagaaagctgaaacactaaactcagaattgaagccgttcattagggtgaaaaagatcgtattcgccagacaagcggttaacaacttttgccgctttaaccagtaacccatgatgtagccgcggcagactaactcctcaaacatggattggaaaatgaagccgactaaaaatagtccctcaattttcaagtcaagtgcaacgatgataacgaattcttgatagtggtctaggctgttacgccatgcatcggtagtaatcgcatgggcgaagatagttcagaatacgtctgggacgatggttcagtgcggattggactgcttgaatttcaaccagggtaattgctctgagagacttccctttcgggaagaattccctaagcagtccattggcgttctcgtttgtgccacgctcccaaggcgagtacggatgtgcgaagtaaatctgggttccaacaatctctgataacttggcaaactcggaaccattgtcaaaagtgatactctcaaattccttggccccgtagtcgtcgatcgtgtcctgcaaggctttaaggcaggtgcccgcatgatagtcaggaatcttgacgatgatctcagtccggctgtaccgttctgtgagcgtcattaatgctggctcatcagctaagcgaatacctttgaccaagtcgccttcccaatgtcccacgcctgtgcggtcattcacggccgcaggacgcaactcgattgagtcgccgtatatcttcttattcttgcgcttgtgggcgttcttatagcctttgatgcggcgtcggagcttcttgggaagtgtcatgttgtctagctcaagcagcccggcgtcgatgtagcgatagacagttgtcgttgaagggcaagccttgccctggtcgcgatagaagtgtacgaagctatcaacgctgtgtacgcgcggcttacgagtaagctccctggcgagagccttgaagaacgcacggccggtcttaagaaaggcgtagtgaccggttctatcgcgtttacggtcgtgcatggcttgggcagtttccgcaagatagacttgatgcgagtgacgcttcgagtcgagctgagttacagatccacgcgtgatttctcgtgagattgtcgctttactgcgatgaagcttctgtgcaatcacggtcgcggtgtcaccagcagcctgaagggcctgaattgtagcacggtcgctaaaactgagttgttggtaatgcttgtgggtgttagtctgagagtgggtcatgaagattcctgctttcttgtttagctagcactaacaagaataggtcttcatggcctttatggtctagtcgtcagggtgttgcacttgaattgtaaactggggtaattcatctaaggcacagatacttgatactaaaattcgcatcctgctgtatgaacttgttaaactgaggtagattgcaaatttaatccgaatttttggacaaatttgtcagcataacctgatacggtgtttgccagtcgagtattttaagcggtcgctggttaatttggagtaacgtcgtcgttaaatcttgagcactaatgtgctcaaaacgagtccctttaggataaaaataacgtaaattccgattaaagcgttcattactaccacgttcagctggagtataagcatggcagtaataggccttaataccatattgtgattcaagtgatactagcccactaaactcagtgccacggtccacagtaaagctgtgcaccggaccattaaaagtggttaggaacttagttagtgcttcattaacagtcgctgtcgtccgatcttttaaccggtatgcccaaaggaaccgtgattttcgatcgattaaagttaataaaactgccttactatgcccacgaggaccaacgactgtatctagttcaaaatcgccgatgcgattacgttgattaatcatcatgggacgctgttcaattgatcgccccaaagattgattatatttggatcgttggtcaacgttacgccgttggcgtacgccatgttcaggtagatcattcaaggagaaaccaattctcccctgatttagccaattataaatagatttagtagctagtttaaattcgtgagcaatcattcctggtgaccagcttagacgtaaatggttgagaattttttgctttaactcatcgctcagcttagttttccgaccacatcgtgatcgcttgtattcggcatctgtttgtgctaattcagcctgataaggttgacatcgagataattcataagaaattgttgacggtgatcggttcagccgaacgcccatttggatattggacagccctagttcacaaaaggtttcgattttaattcgttcggaataggttatactagacaaaagatcagctcctaaaagatgggtttgtggtaaacaccattttaaaggaagctgatcttttttgtccgaacagcgttcggattaattttacaatctaccctgagaccacatcgtatataaggtacttatttagttgatcccagttgaaaggtcattctgaacgcaacgcaagcatcacattgtgcatgtttaacaagttttaaaagccaaaactgatataacagaacatctctccacgaaaatgatagcgtttactaaaagcgctgtcaatgtttgctagaagtctctataattttgggagcgaagcaacatctttctaaaaaaataaaagtgttatacaataaaatggataaaaaaggaagcgtgacgtacatgcagatttcgaattatcaagatgaggcctatactgccatcaagcaaatgattctcagcatgcagctgactcccggggaaaaggtcgataaatatgaattgagcacggagttaaatatcggcgtgaccccgattcgggaggcaattattcgcctgcgtcgggagggcttatttgatgtcattccacaaagcggcacttatgtatcaaaaattaatgtggatgaaatgaatcaaggccgatttgctagagtcgaattggaaaaaactattattgctagcgctgctgagctgacagcggatcaagttgacgaattagaacagcaaattgctcttcagggtgtctatgaacataatcaagactatgggcactttttcaaattagatcatgatttccatgaactcttttacattgcagatcacaaacaatttgtatggacgtgggtacaacaaatgaatctgcagtttattcgttatcgctatctacaattagaaataaatggcatgcactggcatcacattattgcagaacatcaggcaattgtggatgcagttaaggcaaaggatacaaggttggcaagtcagatggccactgatcacttgttagcagttggtaaagatgtcaaatcagttttaaccacttatcctgattattttaaaagtcatgaatcgaacgagcctcagttaacctgactgtgttcttgctcgcggaatgattcagttaatcaatgacgtctgaaaacgtagatttttaacaatcctgttttcaggcgtttttgtgtacggtcagctaagttctgtgcatcgtgggtgctgaaacttcggcgatcaaaaataacgacaagccagctcattgacgttaatcggcgaaaacccaacgtttattttttgaggaacacaaaattgccgtgcacgattacacttaaaagaagaatcagctttttgcataatgccgagatggagcactatatgtcagccaaatcaatcttgagaacgcggtatcgaaatggctttcgtgtcaatcaagaactggggatgcctttatcatttgtattgcggattaaaagccacgctgatggcgttgccttacggtgttttcgtcagttccctaggaccaaactggtcgtggtgggggcttctttcaggcagcttattgtggctattcttttgcttcaattttgagatatacgttcatcagcatattcaaaccagaacgctcgctgccatgtgggtttccaagggacaatggctgacgagactggggggaacagtcctgatttgtggcgttttcgtatatctgcatattttttatatagcagcgccatgacacagctgctttgctattcagaaagttgcttgtaaatggagaaggcttagaaagcgaggatattatgaaagctgtctataaaggccgttcagctgacgtttgggagattagtcaaaccaatgaacgaccggcttgggttaaagccgcttttgaagagaactatctatgttggttagacaatcacctacgcattttaatgagtggactgaacccgtcgcttggcgcaaacttaaaaaccgccgcggttggtacgatcggcggcggttttgctggctataacatgtatgcgcttgggtatctaggtgattatctagatgttacgaatcatcgagttgtttcgaagaaaaagtttttaaagcagtatcagattcaagggaatgcctagctagtcattttctgtatattgataagctggcttcaagacaaaacaaaagaatctgaaattcctaaacacttggaatctcagattctttttctttcctaaaactttttttcaagcggagacctataagcaatccattgggtaattgccgctgctattattcacgcaatcggggaggccggcttttcgtttcaaatatgatacaagccaaattctggcaaatctttttttaaagcgtcaacgaagtccacacagtttcccgcctttaaagcagacaaagcagcactaactagttgtctgccttcagcttctttccccgtcctaaatagcaatattcccttatagtaattcaatagcacgcgctctaatagaaaagattccggtaaatctttttgctcaagaacggctagcgtttttaaagcatgctggatttgtccgtaccgaatcagcagagcaactgtgtttagcaagacattcatacacgtctcgtaagtattgggtagaccaatgtaaatagcgcatttgtctaatagggtttgtgaaaatatggtgatggtttcaatgggaagctgggtcatggtattgccatagaggacgagttcaaagttcccccagtcctcacactgaaataaataatccgttagtatattcaagggaacatggctaggtaggggtttcttttctacctctgcgcgaacacattcagccataatccagttcagctgatcaaaaatcaaatgcgagttttggcaacgcgcatattcggtgtcgactaagtgattaagtccttgaacattattacttagagcaagttgcgttaattcggttgataacttgttatcatataaaggctcaaagtggttcatgacgattgtaaattcaaagggagtgacatgaatttccttaagcaaatgaaagaatcttttggttgataggtctgatgtgccattctcaaatttcgaaatcataccctttgatacaacatcgtctgctaaggagctaaggcttatgcctcgcgactctctcaagtacttaaatgttgcgccaaaattttcgatgatgagcatctcctcgtttcgttttcgaaacataactattgaaactcagtttagcggttatcgtatgaagtatcaataaaggtcggaggaagtgcttaatcatgaaaacatatttaagacatcagcgaggccgcacagggatcaacattgtttggattattgtgaacgtccttttgtacacaggtacatcagttcttttaacttttacaacgaatgccattttttcgagggatatgaaggcactcttactgtggtccggcattaatctttcagtttggggaacttttttgatcagcaattattttcaagcggtttttcaagaaaaactgacgcagcggattatgattgatgtgcgtgataccatttcgagaaagattgtcggaagttcttatgtacagtatcacaaacaaacaaccggagagtatctttctgaatatgttaatgatgttggcaacattgaaagtaacgccattaagaacttattctcgttgctgtctgatgggactaccgttgtcttcgcaaccatagcacttgctgcttatcacttactattcatcccaatgattcttttcttatcgatattgatgctgaaaattccttctcgtctaggtaagccaatgaccgtggcgacgacagaaatgtcaaacgggaatgcggcgttctcgaatcaagtgaccaatgttcttaacggatttgatgttttattaaatgcaaataaattaagcaaacttcaagaactggtaaaaacggctgccaaaagatatgcggaagtgaaagtttcatacactaaaaccaacgctcgcatttctaattcaatagcagctttaagtatcttctgtcaggtcatggtcgatattatgaccagtattttggccatccttggtgctattccacttggggcaattagttcaaccggcagtattgctgctagtatttttaattctttgtctagccttagcaacgatgccgtgcagattaaagcaacgcacccattatttgataaagtcattcaaggatcttctaagtcggcaatggcaaacgaaagcacccaagaaccagcatttcagcacgctttaaaggtggttgatcttagctattcgattaatgggaacaagatacttgatcacttgaacctcacatttgaacgaggaggaaaatatgcgatcgttggtcgaagcggtgtcgggaagagtaccttattgaaaattttagatggtcaaatcacggattatactggacatgtttatattgatgaccaagatttgcgaacgatgaccatgacaggattaacaaagatttctcaatacgttgatcaaaatgtctatttattcaatgattcagtggcgaacaacacctcactttgggcaaataagcaaaaatctgggaatagtttgccacaggcactattaaaggcaaaggtagatttcgttaagtcaccagatcaaatgattgaagagaacggccaaaatttgtctggcggccaaaaacaacgcttagcattagcaagatttttctactcaccaaaaccaattgcatttgttgacgaaggcacatctgcgttagacgcagaaactgctagacaagttaccaagcaatttttgaatgaccctgatatgaccttgattgaggtgagtcatcaccttgatgcgcagttgaagggggcatacgatcaagtgatcaatttaggcgcatgacttggcatgttgccagacttgatcgaacaaacatttcaaaaaatactcggaacagattctttcagtgtcccgagtttttgttttgcaccaaaaaaattcccgatttctcgggaatttctgttgctatttggttttcactctttaacaagggaactaagactgtagattattcgcttgcgacccaaccgtagtttcctaattgtttgaatgaaaagacgtcataccaaagaaccttttctgtttcgctgaatgaaaaattgtcagacagtttcttacaagtagggtctttatggcatcataacggcgcgaacatcctagacgctcttttagacgctgcttactgctgatccgcccgcaaccgccattgcacaacaaaggtcaacacagcaagtaccgcaagtacgatgaagtcgatctgactccctgtcgcgtccgcgcccaccggagagaggcggtgttgcaaggtgatgatggctgataagctggcagtgcctagtgagccggcgtattgttgaatggtattgaacaaggcgttgatgtccgctttggctgagccggttaccatggtgctggcgtctgacatggtgttgccgaagccgaggttgaagcccatgcggaaaatgatataaaagccgacaattaaaggaatgctcagctggtgcgtgaagatgccgagcaagatagcgcctatgaacatagcggcatcacttgtcaggagcaggcgacgtgcgccgaaccgatcgtacaaggcgccaccaatgggtgaaaccgccgcgccgatcaatgaaccgggcagtaaaatcagtccggccacagaagcattggtatgcaggacgttttcggcgaaaattggaataacgaaagcaatgccaatattgctgaattgtaaaataaagaagttaatggcgcgtgcccgaataccagcctttttgaaaagcgaaaagttaagcagcggtgtggctgtatgttttaagtgatagctcatcccaacaatagcgacagccaaagccgcgacatagccccaaaagccagcagtcagcccagatgccgtgaattgatccagcacttcgatgagtgagaacagaccaagtccaagcagcagcaaacctagaaagtcaaaacgatcagtcgtcgtctgcgctttaacgcgaatcgtggcttcgcccaaggaccagacgagcaggataactggcagtaccagccaaaaaatcatccgccatgaggcataatatgtcagtaaaccgccataagttggcccaagcgcaggggccagtgacgtcacaacactggccatccccacgtaaatcccgaggtggacttgcgggatcatggtcagaatcaaatgaaacatcaacggggtcgagaccccagttgccagggcctgcaacaaacggccagcaaacaaaattggaaaactcggtgcccagatacacaataaggttccggccaggctgcaaagaatggcagttcgaaacaagcgccgtgtatcaaatcgtcgcaataaaaaagcggttgtgctcatgaccaaggtaaccatcagcaaataacctgatgtgagccattgcactgtcgacaatgaaacatgcagcgttttgataagcgttggaaaggtaacgttcatggaagtctcaaccagaataccgacaaacgtcagtaatcctgctgataaaatagccaattgcgtgcgatgtgaaactggtgaagttgtcatgggagtgccttcatttctatcatttaacctgatacacatggatcatgtagcaacaggtcactgctgacgatagcagattcaaaaaaatgatgcaaaggcaagcggtttcatttaaagcaaagtacagtctacatatagctgcttaataaacaatttggatgctaaggaatggttccgttagttactgaaagccaccactatgatcaggatcgtcataactgcgaaaacgagataccagaataaccggcctgttggattattggggttaacactaatgccaatgccaaatctttttgagacgaacaacggttgctgttttgtttttggagcgggtgcgtagtgtaagaagcttaagatagtcaaaatgaggacaaggatgagagggacaattcttgctatctttgtatctgagcgcaaggtccacacaacagaaagcagaaaaaaggcaaaaatgaaaagtatggttaatgatagtagtttgcctgatttgtttgagcgcatgatcgacatcccctagtgttatctttattaaaccactgccgagatggcttcaacttataacagcatcagattcatggcaacaaccgaatcatatagctttctaaacagatacaaaaacacctgcagtcttggaaactacaggtgttaggtctcaacggagagagtgtgcgtgcaacccgtttatttttttgaatcaggggggacagccgctaaatgaacacgcggtttctgtgacgtgcgcggttccgccggtgttgctgaatggcttgagtttgggccacttggcgttggtgttttagggctttttggtgacgtatgatcattgtcgtcatgtgggccggggccttgcggataattatttttgttcatctgcttgtcagtcaggctgatgacactggacatgaccagtgggagcaggaagacgaggaggatcaggccgatgatgacggccagcgcgacctgaatcagggttgtaatgccggatgggatcatcgcggcaaaggtaccacttaggatgatggcagcggagatgacaaccgcaccgatgacgctagcggctttggcaatccgatgcgtcatggtgccgccttcgagggcgttatcacggtagcgcaccatgaggaagatactgtagtcaacgccgagggcaacgagcatgatgaaggtgaagaacggtgtattccacgtcagcatgtcgcgaccaagcacgtaagttgagaacagtttggtgaggcctaacgaggtgacgtaggccaacagcaacgttgagataatgctgataggttgaatcaaggaccgggtgacgaaaatgagggcgatgccgataccgataatcatgatcgcggcggttcgttcaaagtcgccattagccagtttttgcaggtcggcggtttgtgaagtttggccaccaaccgcaactgttgcatcggctagcggcgtgtgctttaatttggccgtcatgtcagttttaatcgcttcgatctgtttggcggcagcatctgtgctgggatcgccctttagaacaacggtcaatttggtaatcttgttgccatcagacatgtaggtcgttaacgcaggcttgaaggttttactctttaaagtggcgttagggatatagaacttcttccccagatacgacttttgcaactcggtcaggtattgtttcatgctggtgctgccgtctgcaatcgtgccgagtgctttgtctgccgaggttaagccgctttgcatggtggtgacctgttcggaaattgccttcacttttgtgttcagggtttggacaccggtattgacctgatcggcgccactggcaacttgcgccgcgccactattgagggtgccattttgcgcggcgagctgtgaggaccccgtgttgagttggttgacaccggaaacaagactcggtacttggctgtttaaggaaccaatcccactactcagttggtgggtgccactggtgagcgtactgatgccgctgtttaaggctgtcgtgccattgttcagcgttttgatgccatcgccaagcgaactggtaccgttcgtcagctgttgcacaccacctgaaaacttggcgatttcttctagaattggctgtgtcagttgactgccattgggaagttggttaattaaggtaacgatttgctgagcactgccggtcaagttctgaacttggctggcgagcttgttcatcccgctagtcaactcaccagatttgtcgctaagttgattcatcccgctggcgagtaccgtactattcccgctaagctgatccatgcccttagctagttgggtcgaactcgtgcttaaggtgttcacccctgaactcagggccggcagctggctgcttaattggccaatcccggtgtttaacgatgcaacgccggaagtatactggccgatcccgctgttaagactggaggcgccggatgaaagggtgttggtgccattagcaagggtctgcacttgttgcgtgctgccggcgacatcagcatttgtaatttgcgtattggctgagctaaggcctgcttgcacctgcttcaaccctttcacgctgtctgtcaggcccgcattaatcgtttggagttgattgtcgagatagagcgacttaatctgactgccgcctggttgtgtcacagaggcaactgtcttaacgccgttctccttttgcaggtaggttgtgaggtcatcaatcgtaccaagaaccgtttgtgtattcaacggttgcttactttgaatatagatggttgttggtgaggccataccttttgaataatgatcctgaatcagcttataaccgaccttggattgtaacgtttccggcagttcatccgcgttgttgaaattcaaggtttggttggcattcagcaaaaatggcactgcgatgatgccaatgatcccgagtgtgatgagcggtcgagcgatgcccattttggacaggccgtgccacagtcggctggtgctatgaccgttgagattcttacttggccaaaagagcttctcgcctaaagtggccatgaagaacatgttgagcgtgagcagcacggtcaagaggatcaaaacaccaatggccacgccaactgcggaacgatagaacttgaaattggcaaggccgagcacggagaagccgattagaactgagaggccagagtacaggatcgttcgcccaccaaaacgtctggcaaccccggcagctttcgttcgtggaatgccttgtgaaagggctgctttgaagtcgtcgtatagcaaaatattataatcggttccaattccgaaaaggacaaccactaggaagacttgagtaaagtttgagattggaaagttaaacttgtccgccaaattcatgatgatgttcaaggaagtcatgaaggaaatggcaacggtgagcagcgacacgagcgggacgatcggggaacggaagacaatgatgagcacaatgaaaatgaagattgccgcaatgatttctgttttctgaatccctttttcagtgacggtcgcaaagtcgtcgttcaagacatcactgccagttacataggttttgacgttgctagttttgatttgtttttctaaattgcgcgtttgcggtccgacttgcccttgggctttcacatcgaccaacgccatctgagtcgtaccgtctttggcgtctagctgtttcttagtttcggcgttgtcagatgcttgtgtgacgttgataattttgacagcaccggtactcttaaggttcttgagagtttgatgaatggcttgtttttgcgaggcagtcagttttttgtcaccattgttgaaaaccagtgcataagagcgaaccttctgattattgttggctttcttttcaatgtttgcggcaatttgactctcttcgtttttcggcagcgataaggcgcctttgtctcggacgatgccggaaacatctggcatggtgattaaagtcatgatgatgacgattagccagaaaataagggccggtatgtgacgatgacgaagatttttcattgaaagatactcctttcacaggttaagccgttccagatctgattttttagctcaagggctaactgatcttgatcgggcacatggccttgaagttgttgttggacccaaacgatgtcaatcatgctgacgatgctgccgtataaaatagctaactgggtgcgaacatctgctttcacaatgacaccgtgttcctgaccttccatcagcatattgctaatcaatgtggtaacacggtcgcgagcagcacgactctctgggcgtagcgcttcattaaacacattttgttcaataaaatgcagttcagttgggtaatgttgcatggtcagtgcagcggcatcaaagaggtgactgaaagttgattcgggatcactgacgttgcaattggcagcgtcagccaatgagtcgtgaaaataatccatgatgtcagtaaacgcggtgttaaggatatcctctttacccttaaagtgacgataaattgtgccaaccgctacattggcagctttggcgattgacggtaaattggtttccgcgtagccgcgttcggcaaacagcttgactgcttgggcgatgattggatctggggtggcgatgggtttcattttttctcctccggaatgaacgttcattcgcatatattagaagttgtgaatattcttgtcaagagcatattgaaaattaacagggagcgtctacgatgttgtaactggcacaatgtctataaaagaagcaatacaaaggtggcatatggctatcattttcaaaaaaaaccaccatcaaaatcttgatagtggaaggagaggtaactaggttaatttttacaacaggctgtcacggtgttcttaacgagactcactttgaataacggctcggttttacccgtgaagttttgactttctgatccagattttgttccggtaagctggcaggttcctcgtgcactggtgtggcatggtgtggcgtgatggccgcctgccaagaatcaggggttggagctgccagcggttggacctgactggtcgagatgggaacggcagacgtcgacggtttggccggttgcggattcccggctgttaagaggctggcggcgatggccaaaaaagtgatactcataagtaagactcccttcgatcatttgactgctttcataacagccaatagcaaaagcttaccgaagggatgagacggattcgtaccgacccagtggcggttttgttgaaaaaggacgatgaaaacatggctttttgctaaaggaacctttaagggtcacaaaaaagacgaccagcaatggccgtctttagggttatataaggttcatgacgattttaagattctgctttgccttttggttccaagcggcgctccaagaagcccagtaccaaatcagagatgatcgccattaacgcggttggcaatgcgccggcaaggatgatggcgccgccgttggttgcgttggtgccgcgaacaatgatgtcgcccagaccaccggcaccgacgaaggcaccaatggcggtgatcccaatggccacgaccagcgcgttgcgaatgccggccataatgacagacatgctcaaaggaatttcaaccatgtacagcgattgccaacgggtcatgcccatgcctttagccgcatccatcaagttcttgtcgacattttgcatgcctgtgtaagtattcttgatgatcggcagcagcgagtagaggaaaacagtcacgatgacggtattcacacccagcccgagaccaagcatgatgatcgataacatcgccagactaggaattgtctgaatgacgttagcgatgccaatcaccgtgctacttaatgtccggtgccgcgcaattgccagcccgatcggaatcccgatgatggcggcgattaacaccccataaattgagatcagaaaatggcgagcaaactgactcagcacatacgagccattattggcaagatagtaccagaattgctgccaggtatccatgttggccattagtcgtcacttcctttgaaatagttgtgtttggcaagaaacttttgcgcgaccacgttcggttcaagcagttgatcatcgacttgataattcagctcttgcatcgtcttcaggttgattttgccatctaaccgatgcaacagcggcttgagtttcgggtattttttcaaaaagctgttgttgacgacgagcgaacattgataaggtgggaagaactttttgtcatccttcagcactttcaagttgtaactgcgaatgcggccgtctgttgagtaacctaagaccgtctgcatcttgttggcttcgaccgcgtcgtaaaccagtccgatctgcatcgggtagactcgtttgaaatcgaacccatacattttggtgaagtcgctataaccgtcgcctttgcggttcatccaactggaatctacgcccgcgttgtaacgcgaagcgactttcttcaaatcggaaatggtgctcaaaccgtcctttttggcttcctgttgggtcaccatgaaagcataagtgtcggaaaaaccataagacgggtaccaagtctggtcgtaacgctttttgaattcgcgcttaacaatcgccgtagcttcggcaggatccttgacgggattcatgcctaaggtaccggtaatgtcggtcccagtgtaacgggtagcactaatgtcagcatcgttacgaatcatcgcttgatgcaccacggtaccagaacccaggttgttgaccaaagtcgttttgtagccgagttcatgattaatgagttcggcaatgatatttgccatgatctgcgattcagtactggtttgcgaagcgatccgcacagtaccgtcattaccagagccgcccagtccgggaaagccgcagccgcctaatagcaagacggggatgaggaacagcgataggagcatttttctgaatgtcttcatctcgccacctcctaggcctgttcgcttactggggtcagccgatgttctagccggcccagcagccaatcaaccaagagtgccaagatggtaaccggaatcgtcccgccaatgattaagtctggctggaagaggttcaagccgttgaaaatgagatccccaaggccgccagcaccgatgtacgatgcgagggttgcccaagcgatgacataaatggcggataggcgcacaccggccatgatgactggcatcgccagcggcacttcgacttgtcgaattgattgcaaggccgtcatgcccatgcctttagcagcatcaatcaaaaccggatcgacatcttccatgccaatataagtattacgcagaatcggtagcagcgagtagatgaacagcgccacaatggccggcaacttgccgatcccaaaaattggaatcattaaggccaacaacgccagcgatggcaccgtttgtaacatgctggctagaccgatgacaactttcgccgttttaggaaaacgtgtcagcacaatgcccagcggcacggctaccagcacgccaagacccagtgcgatggcggaaatgtagagctgctcccaagtcttggtgattagctcgctgccatgtgcgtttagaaatgcgaacatggtcacacctccttaggcgtgtcactgttagcaggcgcttccgaagcagcagttgctgaagcggtattttcggtatcgctatcagcttggtcactgtcgttatcgtcagatttgtcatcgttgtcgccccagatagtgtcataaacaacatcgactaaagctgctcgggtgacaatgccgacaagtttcttatcatgatcgacaacagggacatatttaagcccgcgtttgagaatgcgatcagcggtatcacgcaaaagtgagtctttattcacgtagaaaatactggttttaatgatatcgccaacactagtggcactttgataacgcgtctcaagggattcaagatcaatgaaacctttaagatgattctcgtcatctgtgaccagcagcgtatcaacgcggcgtttgcgcatcagcagaatcgcttcggccagtgatttgcctggtgtgatggcggctgggtttttaagcatgatttgttcaacggtggtgacatcggcccgcgcttgaacaagtcggtcttgcccgacaagattttcgacgaatttgttggccggatgggttaagagttctgtcggtgtcgagttttgaataatatgcccatgatccatgaccacgattttagttgcgagtttcaaagcttcgtccatgtcatgggtgacaaagaccacggttttaccgagtttttcttgcaagttcttaatcagttcctgcaaagcttcacgggtgatgggatccaaggcgccatatggttcgtccatcagaatcagatcctgattggctgctagcgcacggataactccgatacgctgttgttggccgccagaaagttcggaaggatagcgatcaagatagtcttctggaagttcaactaaatcgagcagttccttggctttttcccggcgtttttcttcgggccactttaacagttttggcacgatggtgatattttcatagatcgtcatgtgtggcatgaggccgatattctggatgacataaccgatttgccgacgtagtttaacggcatcgattttatgaatgtctttgccgttaaacaggatctggccgccgctgggctccagcattcggttgatcatccgcatggtcgttgtcttcccggaaccagacgtcccgatgagacagacaaaatcccccttatggatctcaaggttgatatgttcgaccgcgacatttccgcctcgataaactttctcaacgtccttaaataggaccattggttgttcttctggcatctgacgcgtcctcctttatttgaatacttctatattaccacatggggttaatcagattttaatacatttgggaacgggtgtttgcaggagcgctttgttagctagctcatttaaagtgatcagaggatttagcggaactaaaaaaatccacctctcggaaaaaggatgggtcataattcccgtactggactgatgattcattagattccgaataatctgggaaagatttaagctaaagaatcctttgccgtgccaaactccgcaatctccggccagctggggtggcgacgcggagctagagcggagacggcgcttcgagaccggtttttgggctcgaagtcgcctaacaacatcagctccacagcccgtcgctgtgttgtttgcacggctgagccccatctggcctacgattgctccgccttggcactggtatttttaaaaattccaatagactacccaaatgaaaagacaaacaatttccgcacttaatagaattcctgcagaaattgtttgtcctttcatttggtagctgtgaattatggcctaaccgcgttcccgtaagcaaccggcgttcccaagagactgacttcaagtgtatccgcgacggaagtgtctttttactttcccgagattcacaatcgcagcatgactagtattgtcacgataatgttataagtcatgtgtgatacaatgcttgtttttattgttccagaagctcgattgagaagactaaaaccaattgcagcaagaagtaggcacaatgaagcaacaatctccaatccgtggagaaaaacaaaaatgagcgaggttatgagaactgatggccaatagccaaaaatacttgccaaataatcttggataacgcctctaaatccgagttcctcacatatcggggttaagaaacacagagagataatcattggccagcgcgatgggccagttaatacttttgcagttgacgactgcaacacattgtcagttggagccgggagaaatggcagattattgagtgttattgttaaaacaacaatgaaaatggtccaaatgaccgctatataaaaataacgtgctttgagtggctgattaagttgttgcgttgaagaaggctttatatgacgatcaatgaatagcagtgatggtattgagatactggccgcaataacaataaatagccagtttaataagacaccttcaaaaaagcagtcaactagggagactccagaggcaaggaataagaatggtataaatagaatgatcccgataaccagctgttttagtttattcaaacatttctccaatttgtagaagcttaagaaacaggtagcatcatgcgctgttgataatcttgtcgctactgatgcttacgggcatgaagctttggattagacgcatacttttcatgcaaatatcttattaatacatagattgccacgcaggttacgatagcgcttaaccccttgagcacattcccgaatatcatattgttcgtccagagagcttcgatatatctgaagatgctacggttaaagagcactatcagcaatgcaccccaaacttttttatcgctattcattttagtatcatctcccaattaacgcatcatcatggctgaggattggtcatactagaagaccactactcaaatatctgttatgtatacgaatgaaatcttacaggaaattcgataagacagcaattaagcccccaacaaccaagataccttcaagactaagcaaattaattgtaactgaaactgatgatgtttcatcagtttaaaaataaacgtcgtgttttcagcttttttcgtcataaacatgccagttccagaataatcatgtcgcaaatccctaaagttgatcaccgtcaaggcagcttttttcatccctcggtacactggtctcaaatggagggattagcgatgcattttattcagacgcataaacaagaagcgatgattgctggcggtgtgctgacagcaggcggtctgatttttagtcaggcatgggtgctggtgttggcgagtttggtggcgggcttgccgattgcgatcaatgcattggcggcgctgcggtataagcagattagtattgagttgctggtgacgattgccctggttggcgcggtgttgattggtgagccggttgaaagtgctgtggtcagttttctatttttattcggtgactggttagagcagcgcagtttggcgaagacgcgttcggcgattcaaggcttggcggctgcggcaccgaaaaccgcgcggcgactggatggcaccatgattccggttggtgacttggcagttggtgatcaagtccgtgtactggccggcgaaacggtaccagctgatggcaaagtgatcagtgggcaggcgaatgttgttgaagccgcgatcactggtgagccggatgcaaaaagcaagcaggccggcgcaacggtttattccggcacgcaggtgagtgatggtacggtggctattgaagttgagaaaaccggctacaacacggtttatcaacagatcattgatttgattgaggatgcgcaggacgcacagtcaccagtcgccacttttatccagaagtttgcgcggtggtatacgccgctggtattgatcattgctttgctcgttggtttgatcagccaaaatgtccgactagccattacgattttggtattaggctgccctggtgcattggtgattggcgcccccgtcagcaatgttgtcggcttaggctttggcgcgaagcacggcattttgatcaaaggcggggatgtggccaccaaattggatcagattgacacggttatgtttgataaaaccggcaccttaacccaaggtaaaatcagcgttgcaacggctcaatattgggcgaacgatgacgccaaagttgctgacctggtggcggcagtcgagcaagcaacggcgcatccgttggggcaggcattggtcgcctacctaaagccgcaaacaacaccgtctgtgaccgacgtgaaagtcacgcggggaattggcgtgcaggcgcaagtggctgaccataccgttagcattgggaatcaaaagagtctgacgcagccgctgactaccgctcagcaagccgctattcaaaacgtaattaaaagcggtgcttcgttggtcgtggcgacgattgacggcaaacttgctgcagtttacggcttacgcgatcagttgcggaccgataccccaggcatgttggcgacccttcaagctaacggtaaaaagacggttgtgctttcaggcgactcgcaggctgcggttgaacacatgatggcggatttgccactgagccagacccacggcggtttactaccagtcgacaaggtcacggcgatcaaggcagcgcaagcgcatggtgaaaaggtgatgtttgtcggtgacgggatcaacgacgggcctgcactggcgcaagcagatgttggggtagccatgggctcagggatggatgtggccattgatactgctgatgtcattttaaccagcagtcgcctgacgaatctcggcgttcttttcgatctggctaaacggatggacaataatatcaaacagaatcttgtcattgcgatcggaactgttgccttattgttaagcggcttgctcattgggttagttgatatggccagcgggatgctgttccacgaaatttcgattctgttggtcatcgcgaatgccttacggttacggcacaccccccgaaagttacaaaacttgacgacgatcaaggacgccgcagcacaaaccgttaataatgaaggtaaataaacaagaaaggatttttaacatgacaaaattagtttatcaattagatggtttaacttgcccaagctgtttgcagaaaattgaaggcgcattaggccagcaagccggtgtcaaaacagtgaaagccttgtttaacagtagcaaggtcaaggctcagattgatccaagcgtgaccaacgccgatgctttgaaaaagacgatcacggacttgggttataccgttgtgaacgtgcgcagtcaagaagcatagagcgagaactggcgcggttagaaaccggagcataagcagccttgggggtggtggctgagccaattacccccaaggtccttatggaggaggtttcgatgctatagaacgcttttaaaaataaacaagcgcggttaagaggagaagaacatgagtgtaacgacaggaatgaaaagtattaccgctgatcaagttaaagaacaacaagcagctgctgctaaacaggctgaccatgaccatcatgtgccaactgctggcgcgatgagtggccacgtgttggcgaacttgcaggtgctgacccgcaagttgatccagtttcgggtgactttacgtggtgtgaccagtgaaaccgatcggcaattgttagatcagctactgcaacaagcacagacccattttgacgaccttgtggctgatttagctgcccaaggcgaagattttcccacaacgacagcggagttcggtgaatacacgatgctcaaggaagacccggcgtttcgtttttggacgaatgatatgaaattggacgccgttgtcaatgatatcgatacctgccagttgtttgtcagtcgggcgattccgcttgccaacaaggagaacaaagctgtgttggcagcagatatgttacaattgcagcgctggcatgaacaaagcattctgcgcttgcaaactcgacttggccgccaagtgacggcggggcgggcattgcttgacgaggatgaagatgacgattgatcaagcttgttgacagagcgtgagcaggcgcgtttagaaaccggagcataagcggccttgaacctaaatggctgggctttggccatttaggttcaaggtccttatgtgcaggtttctgcgcctgcgaacgcgtttaggaggtggcaacatgacgcacagttgtacggcggtagtgccgttattcaaaaatttaaacgatgaggcgcgtgccgccattgacgcgttgacgcacgaacgccaggttgaaaaaggaactgttttgatcagccctgatacggccgcccatttgttggtggttgcgcacggcaaactcaaaacttaccagttggccaccaatggcaaggaacagctactacgggttgatggtgttggtgattatgaaggtgaagccggcttactcaatatcgctaatccgaatgtctataccgaaaccctgacggcggcaactgtctgcaccatcagtgccactgactttcaacaattgcttctcaagcagccgcaaatcagtctccaactcctgactgaaaacgcccgtaaaatgcaggcgctggaaaaacaggccggctatttgggtaacgattcgatcaacgttcggctcacccactacctactggacttgcgtaccgcggcgggccaggacaccgtcacagttccgatggcatggacacaattggccgattatctcggaacaacgccggaaacggtctcgcgcactttgaaacgactcgccgaggaaaaactcattgaacgttcaggtaagcaggtaagaattctgaatgccgaggatatggaagattttgcttggtgaggttgccgagtgatgttttttaaatacaaaaagccacgaatcatgcaatctaaactaattgcacgattcgtggctttttctttgttttgcaagaagcgacatataaataaatcggcactgaacaaaatttaaccaaaacaatttttcgttttttaagaaagccagcaaccgcaaccttcaatcaaagaatacttattgaccacatacatttaaatctatagactgaccttaggcttagagagaggactaattaccctgttttcttcgtctagcggattggatggcacacacccctcaacattcttgagacgcggaggcgagagccatgccaaaactaggagacgaaaggggttcgccgcgctggatgtggcgtcgattatcatcgcgctaagcatactggttaccagtatcgccaaagcgtatgcgataatcaaaaaagctaaccgcaaggattagcttttacccaaatagtcatctgaaccgcgttgaggtcatcgggccgccacccgatggcctcttttcaacgacttaattatacacaagatgctaacaaggcgtcaacatacttactttaatgaagttatatgtgaacaatgctgatcttggtcacacgattatttcaccgaaatttgctttttagcatcaacggacactcggatctgcttagtaaacttttcaatcgcagccggtgcctgttgtttttccttcgcgacaagatcaacgatggcgctgccgatgatgacaccatcggcgatgcctgccattgtttgtgcttgttcaggcgtgtgaatgccgaaaccgatagcggttggaacgttggtatactgcttaatttctgcgactaatgcctttaagccagcaaagaattcatcgcgttcgccagtaatgcccattgaggaaacgacatagataaatcctgaggcacttttggcgattttttcaattcgatgaccggaagttggcgtgattaacggaataatatcgataccgtatttttcggcaattggcacaatttcatcgcgactttcatatggcagatctggaatcaccaagccggcgacatttaaatccgcacagcgttttaagaaggcttcgtagccgtatttgaagacaatgttcaagtaagttaggaagacgattggcaccgcggtttctttgcgggcagcctccacaatgtcaaagaccgttttggtgcgaacgttggcggcgaatgctcttaggtcggcggcttgaatcacgggaccgtcggcgactggatcggaaaaagggatgcctaactccacaatatcggcgccacctttggcaagtgcgaccacgtttttgacggtggtttcaaaatcgggatcatcagcgacgatgaaggggataaagactttatgatttttaaaaacatctgctaacttactcatcaacatcgactcctttgtatttggcaatgcttgcgacgtccttatcgccacgtccggacaaggtacagataatgatttgatcttttgccatctgtggggcaatcttttcaacgtaggcgatggcgtgacagctttcaatggcggcaacaatgccttcttgtttcgcaatgtaggtaaaggcttcaactgcttcgtcgtcggtaatgccaacgtattgcgcccggccttcctgagcgagagcggcatgctcgggaccaacgccggggtaatcaaggccagcagaaatggaatagaccggatcaatctggccatcttcattttgcatgaataaggacttcatgccgtggaaaatgccaacggagccgcgttcgatagttgcggcggttctgtcggtatcaacgcctttaccggctgcttcaacgccgactaattgaacagaaggatcatcaatgtaagcagcaaaacttccaatggcgttactgccaccacctacacaggcaacgaccatgtctggcagccgagtttctttggcctgaagttgctgtttcgattccgttgaaataacactttgaaaatgtttcaccatttcggggaacggcgcagggccgactgcagaacctaacacgtagaaagtgtcatcactgcgactcgcccattcttgcagtgtggcgttaaccgcgtctttcaaaaccattgatccgcttgtgactggatgaacctttgcgccgagaagttccatgcgataaacgtttaacttttgacggtcagtgtcttctttacccatgaaaatttcacagtccatccccatgagtgcggcaatggtggcggtagcgacaccatgttgaccggcgccggtttcggcaatcaggcgctttttgcctaaatgtttggcaagcaaggcctgaccgatgacattattgatcttatgtgcaccggtatgatttaaatcttcccgttttaagtagattttggcgccaccaaggtcttcggtcatgttcttggcataataaagcaacgaggggcgattggcgtaattaaccaatagatcatttaattctgctttaaattcaggattatcttttaagtcattgaaagccttagttactttttcaagctcggtcatgagggtttcaggaatatactggccgccaaagtcttttccataacgaccggcgcgtgttgactgttgggttgtttcatttaatgtcttcatagatgatgtcctcttttgcttgttgaatgaattgggtgattttatcagcatctttatggccgttggtttcaaccccgctggagacgtcgaccatcgtgggctgaacgagttgaaccgcttggcgcacattcagtggcgttagaccgccagccaaaatgagaggtcggctgatgtgggggatagcttttaagttaagtagttgcccgctgcctttgccgctatcgaccattaaataatcagccattgaggttagatcaatggcctggcgttcaaagacctggatcacttttaaaccggcttgttgaagttgcgtgatttcggctggggtgcttttcccatgaagctgtgcaacatcaatggcacctgcttgatagatagccagaatttcggcaactggctcgttgacgaaaacaccaacggtcttgatcttaggatgaagcaactgttttagggataatgcttgctcaagcgatatttgatggcgcccgggagcgaagacaaagccggcaaaatcagcaccagcagtattgactgccaaaatatcttccgaatgcatgagaccacagattttaacgagtaccattttgggaacctccttaaccgcgccagttcacgctctttctttaaatgctgcaattaattgtctcttttggttagatcgcatgagtgtttcaccgatgagaatggcattgaagccagctgctgccagtttttcaacgtcttcctgcgtcttaatgccgctttccgcaacgacggggatgttgtcgggcaccatggctcttaatttcaaactattgttgaaatcaactcgaaagtctttgagattccggttgttaatgccgattatctttgcacctgactgtagtgcccgtgtgacctcagcggctgtataggcctcgacaattgcgtgcataccgagtttttcagccagttggcgataatcgcgcaattgctgatcggttaggatcgcaacaatcagtaaaataatgacagccccgtttgccttagcctcgtagatcatataaggatcaatcgtaaaatcttttcgaagcgttggcaccgacacttgttggctgatttcctttagataatgaaggtggccgttgaaataatcgggttcggtcaagaccgagatagcatcggcaccggcttgatcgtacgctttggcgatcgccaagtagggaaaatctgtgacaattgtcccctttgatggcgaggcctttttgacctcagcgatcacgtgtaggccaggttgttttaagcgtgttagaaaatccggcttgtgattgcgcggcattttggccacggtttgttttaaatcagcaagtgactgttggcgttggtgacgcgctaaacgaattttggtcacagtcaccaaatcgtctaagatcatgccaccacgtccttacgcttgtcggagaaagccagtaggcgattgagttcttcaaaggctttgccatcgtcgatcgttttagcggctaaatcaatccctgcttgaatggataagtcgggatgagccacgtgaagcgctgcaccggcattcaacaacacgatgtcgcgttgcggtccgtgatcgccggctaaaatacgccgggtaatgttggcattggcctcaggtgtgccgccaaccagatcagcccgctgacgacgtttcaagccaaattgctcaggtgtcactgtgtatttcgttaagtgatcatcctgcaattcaaccaccgcggtttcatcggcggtggtcatctcatcaagaccatcgcggccgtgaacgaccatcgcgttggtgacgccgagctttttcaagacattggctaatggctcaagcaaggtttcatcgtaaaccccaagtagttggtgagttgggtgtgccggatttgccagtggcccgaggatgttgaaaatggtgcggaagccaagttgctttctaacaggggcaacgtacttcattgatttgtgatattcctgtgcgaatagaaaggccaaattgttttcttgcaggctttcataactgacagcgggtgtttcattgatgtccaaccctaaagcctcaagaacatcggcggccccgcttttcgatgaagcggcgcgattaccatgtttagccacttgggtaccagttgccgcgacgacaatcgcgctggttgtggaaatgttgaacgtgttggcatgatcaccaccagtaccaacaatttcaagcacatccttggtttcgggaaaagcaagcgcgtggcttctcatagaagcagctgcaccggcgatttcatcaatcgttggattcttggcggttaacgcggtcagtaagctggcagtttgcacctcagatgcttcaccgttcatgatttcatccaaaacggcttcgctttcttcaaacgttaggttttcgtggttcacgactttttcaatggcttgtttaatcatgatgaatgcctccaaattgtgttttgacagggattgttgtgagttttaagtgattgaaagctatgataaaaatcgccatcgtttaatctcgtttgtctgattcatacccaagacctccttcgataacgcgctcaccagcccggaaaccggctcgcgctcacaaaaaaatccgcccataactttgaaaagttaaggacggattttccgcggtgccaccttagttcgattaattcgagacttcaacaaataatagcatctgatttgtctaagaatccccatttaatcacgcttagcgagagaccaacatctctccgacaactgacgtatgcctttacgtttctccgtacttgaagtctttcgggagaaccctccgtggtccatttaatcatctgcgttcgattgcactctcagcaccggcaactctctttgcgcgcacaatgatcttgatctccacatcatcggtttcatggatgaattattaatggttgatttgaatattagaagcttctccagaaaatgtcaacaattttaatttgttttccttcgaatttttgacaccgcctgtaatcaggcaggaactgctcagtttaaaaggtgcttcatcttgtaaaacacatacctttgcttgtatcgagccgatggggatgttgagtggaaacgtgaaaaatgacatgtgtctcagatacccccgatcatttttaggaagaaaccaagaatgggaccatacacacagtaatcagtttcgctcaaaattcgcataattggcgcataagtgccgactaggggcaaaagcaaagcctggccgaaaatcaaaagaaagccattcactgaggaaccgataatagcgccacgaacaccaccgtgggcatcaccaaatattgctgtggccgctcccgtgaagaaagttggaatcaaggcaggaaaaacgatgatcgggtaattcgtcgcacctaacaaaagcatgccgatcagccccgtggtcaagctgcataggaagccaacgatgactgaagtcggatagtttggaaatagcagcggaatatccagccctggcttggcgttaggaataaatttgtctgcaaggccatggaacgcagggataatctctgataacatcattcgcacacctgtgatgatcaccgtgatccacatcccgaattcaacacctttgaggacagcgaaaacgaccacatccttcccagcagatacgtgttgcatgagccaactattaccagcaaacaatcctaggaagaaaaagagtgcagtcatcacgatcgtcaaagaaattgtcatttctcgcaaaaagttgagttgtttggggatcttcaaatgttccaaatcattttgcttgtttccgaagagcttggccaacactgaggcaacgactaatccagaagaactcgagtgggctaacgtaaagccatctgcgcctttgacgggcttgatgaagtaattcacgtaggcacaggacagggtcatataaacgcccaaaataagtgccccgatgattactaaggggatgaatgacagattggtattgtatttcagcaaggcagcaatcatgcctgcaaaaaagaaagaaacatgaggagatagatggacaaatttgaaccttgtaaaccgcgccatcagaatattaatcaagaagccgagtgcaaaaataagggccatttcggtgccaatttttgctagacttgccgcctgcgttgcgccaatactatcactgccaggggctttgatgccgaagatttttgagatcatttgctgcagcggcaagagcgccgtcccgagtgtctgaccgcctacgttaatcatcgtgaagccgataatggctttaatcgtgctcggcagtattttatcccaagacttatgctggacggccatccctaaaatcacaaccaacccaataatgaaaatcggctgactcaacacgttattgatgatatatagaagaatcgccatcttgtcaccctacttctcgcgactgatcgagaccggagatgtgctttaataactctgatttcaaataagctttatccatcaggttatctagtctaataattggcgtgggtgactcagataattgattagcaaagtccgaagtcgtgatgacgagatcataggcgttcggatcaacggaactaatatccgaggcatccacctcggcttcaatcttttcagcgtctaaaatttgttgggcaaaaagtcgctccatcatggaactgcccacaccggcgccacatacagtcacaattttaatcattttgtttttcctccgaaattagttgatagattgtatcagcattcttagccccaatgatcgcctgcactcgattctcgtcggatagcagactcactaactcggctaaggcttttagatggctttcgtaatcagtagcacataggccaatgactagtttgactgggtcatttgttggatgtccaaatctaatgggttcagctaacgttacaagactgaacccgaccttctttgcaccggtttctggacgcgcatgaggcatggcaataccgggagcaatgacaatataggtgccattgatgtcaacgttgttaatcatggcatcgacataattcgggtcagcagcgcccactttgaccaataacctgccactttcgcgaaccgcttcattgcggtcttgggcggggtactttgcttcgattgaatccttggttaaaacttcttccagcattagctgacactccgttttttaatgactatcgctgaagcatttctagattggcaaaagttgccatcgtttaatctcgtttgtctgattcatactcaaaacctccttcgataacgcgttcgccagcccggaaaccgggctggttcgtgctcacaaaaaaatccgcccataactttgtaaagttaaggacggatttttccgcggtgccaccttagttcgattaattcgagacttcaacaaataatagcatctgatttgtctaaaaatccccatttaatcacgcttagcgagagaccaacatctctccgacaactgacgtatgcctttacgtttctccgtacttgaagtttttcgggagaaccctccgtggtccatttaatcatctgcgttcgattgcactctcagcaccggcaactctctttgcgcgcacaatgatcttgatctccacatcatcggtttgttcatggacgaattattaatgattggtttgaatattagaggctctcctgaaaaatgtcaacaattttaatgcgtacttttgtaaagatgtttgaacaggttcgcaaagttggcaattaacatgactcgtgatgtagggcattaagatatttttctaggtacttatcgtggtcttttgggtgatactgtgtgataaaacgaggatgttctaacggcacgattgtttcaaaaaaatgatactgatgattaatgttcaccagcaccttataattttcgccgcttccgatgcagtagcatactgatgtatctatgccaaagtcgatttggcggcgcagtgagtacacaataaacggaagcaaaaggttctgtacttttttattttcatagtaattacaattaacttcatttcccttggcattgatgctagccaagccgagtggacagacaaaccctagataaaaagcattgtagaattttttgctgccgccatatttggtcatgacgtcatataaaaagtttgatgatgactggttaatataaaattgatcaatcagaataccggtttcagtttgaagatgttttgcgtcttcaaaaggtacgccagtcatagctgttcctcttcgtgcaggggaacttcccaaaattaatcgccgaggcttcgtatcatcaaagtatttttgataaaacgctgtcgttatcttgcaaacagcagcttgttgtttgccactataaggattgatgagcttaaatttgtcaggtaaatcaattgatacggatgagagatcattagtgaatttcaataccttgtctgcaaaattcgtgcgatacattttacaccggccttcctgctattctcagctgcatgtggcgcatagttttgctcgatattttaggcctgataggcgcttggttcctaatggtcggcccggccgcttttatggttaacaagtttcaatgcttctcactatcttataatagttgggtaatttcttaaatgttttttgactatggatgtcatgctaaggtaactggaccactaataaaggcgccaaaccatgcagtcacttttaggctttaatgagttagcgctgccttgttccgagaataatagaagcttagactcagtaacaatagcaacagcacctagacgtggagaaggagaaatgatgatgaacaaaaagttgagcgtggcagtgttggcgctcggatgtttgagtttactgactgcttgtcagccgggtaacgttgtgagcaaggttaagcagcatacagtgaccgttttaaaccaaaaggatcaagtgtggcgcgaaactgaggcggtttctgccacggtaacgagtcaggggagtttgaaaaacgagcaagtaaaaccggacaacaagttgtcacctgctatcacgaatgccggtaaattttacagtgtcgctactttcaaacaaagcgattatgccacgatcaaaaaggctattcagaaaaatgaagcacagcctaagacactccgcttcgtcacagtgaagcaagtgaatgcgacgcttaaagcgatgggggcaaccaaacagattaaagcattaacggatttggtctatacacaacaagcggatggtcacacttttcctagtaatgatggctatctcattgaaggcgatcatttgtatgaagtgatcatggcttacacgacagggggtaatgctagtaccgtcaatcgcggcaatgtttacgcgcggaaaatcaagtacgggacaactaagcaactgactttcaatgaagtggccggcacttggcaaagtactgcaggcgatcaagctaccgtgcgagatgatcaattggtgaccattcagaacaagtcgtatgttcgcggcaaagttgaaaatctaagtcacttgcaaggagaaaagttatatcgaaacacggcgtactccctgcgacagacacaattggtcaagcaagatgctaagttgacccagcaatcgttggtagcaggtgacttgtatgacaatatgtatctattcctatcaaagacaaagatggcgcgtgtgaatactaacggtgtgaccatttttacgaaaaaggcagcgcaaagccagattcctgctcaagtttttgaggtttttcggttattagaccagcgccatacagacgaagtcgcagcttatttattaccgcacgggactgacacttattctgtggcactgactcgtagcatcaactatgcaacggtaaattatgaaggcggcgcaacgggagcagaatcagtgtcgattcaggatggcaaaattagtgttggaccagacttaaatcacaattgagcatgactcacaactttactcgccccagtcaaaaataaaaattggtccatactcaaaaaacatcagcaggcagtggttggggcaactgcattgctgatgttttttgatttctcctaagcgatgagaaatagtcaaagggaattattcatgccaagccgccgatccgtccaaaaagccactggtgatagacataggacaatcaaagcgccaatcaggtacgtgtgactaaaagcctgagctaagcgggtgtttttgcgttgggtaatgtcgtgaaaagcggtttgcagggtttgtttctgggcgacttgtttgatgccggtcaaaaaggcagcttgtccttgcgccatggtcgcagcacccgtgcttagttgcacgatactggtggcaagcggtgaacgggtttgttgagccgcttttgccagtgcttccgagccgtttgccaacttgttactgccttgttgtaagcctgcactggcatcatacaacttgcgaagatcactgccagcagcgggctttggtagattagttttaactttggctgcttctgagatggtttgcctcatctttttctgttggtgctttgtcggggttgatgatccggcaaagaccgcagcgagctgctggtgagcaactgttttgacatgtggcgacaaggtttttgccgctatgatttggtcgccagcatgatgaatctgcgtttttgctgtgtcgatattggtatccaatacggtgaccagaatcgcaatacctaaacaggtaccaatttgccgggccgcgttgacaatcccggaaccaatcccacttttatttttgggtagataacggaccgaggcgaccattgagactgaagcgaagccaaaaccgaaaccgttaatgacgagcagcaccacgattaaggcggttgcggtttctgttttgatgagcgacagcaggaaaaggctggcagccatgagcagcatgccggctaaggtaacgggaatagcaccggttttatcgagtagtttggtgccaagtggcatggcaatcatgatcgttagggaaactggaatgatgatgagtgcggcatgcaaaggactatcgcctaatacattttggaggaaatagttcagaatcagactcggtgctactaacgcaaagccggtcatgaagtaaacaatgctagaggcactcaacgttttttcacggaaaagatctagctccaacagcgggttcttcacgcgcttttcggtggcgatgaacgcaatgagggcgaggacaccgccaattaaactggtcagaatcagcaaggatgtccagccgtattggcgaccttccaacaggccaaatgtgacaccgccaagcgcggccgttagaaagacaagccccggaaaatcgataccgccagcgagggattcatcataggattcttttgcgcaaacggcaatgagcacgaaggcaaggatggctaaaggaacattgatgccgaaaatccagcgccaagaagcgacttgcagaatgataccaccaattggcgggccgccagccgctgctagtgccgtgactgctccgacaacggaagcaacgcggttgattttctctttaccgaagacctcaattcccataggcaagacaattggggtgatgatcgcgccaccgagaccttggaagaaacggaaggtgatgagcatggacagagaagtcgccgtcatacaagcagcggagaagccgccaaagagaaggagaccaagtaacatgattttcttgcggccaaaccggtcagcaattttcgaagcggtaatcatgaagaccgacatggctaaggtgtaaatcgtcatgacccaactcgtattagcaagcgagccattgagatccgtcatgatttttggaatcgcaatattgacgatcgtggtgtcgagggttcccatgaacatcgcgatcgtcaggccaatgaagcaaagtgctttggtaaaacgcgtcatagcatccagtcctttcatctgatacgtttgtgtctatgtgacacatgtgtgactttcgagagcactttgagtatactggggcttaggagaagcggcaataggttgcagacaagtgctacaaattggcagtatttgtgtcagataaggggatgcgagcgatgaacggtaaacaacgaatggcggcgcagtctagacaatggttggttgatgccttgattgagttgatgcaacgcgaagatgtggctgatatctcaatcacggaaatcgtgcagacagcagatctttcacgaaagactttttatcgggcatttaaaacaaaagatgacttaatcgattatctctgtgcccaattgacggatggttattttgaaagtttgcaaaaagccacccgcgatcaggaaccgattagttttgaaacaaccatggcaaacttcttcaacttctggtggcagcaaaaagaccttgttcgcttattgattcgacaaggtctgtttgatcgtttgaacggggtttggctgcaagacgcggttgctcactaccgcgcgtttcctgcgccttggcatgtcgccggtaccgatcaggaagtgaactacatcatggcctttgccctcggtggcttcacgaatattctgcgcgtctggctggcgcaagatgagccagaatcgccagaacaggtgcaaaaaggggcgctggctggttttggacaattggcgcggagcattggtgggacgaattaagtacttaaccaatagtttaatagctgaactaattgcgtataagtctttgtggacagtatgatgggcatacaaactggtagcgtcaagaatcttgtgtaaatgaaatgccttcgtacatataatatgtatctaacttaaataaatgatgcttccaaggtgtcctggagtccttttaaccctcggtggatccgcttcagagacttctcgttataaacattaaactgagaaaccaggaagcgatccagtgaatcttccgttggaaattgttctttgtggtgggtggtgcgcttgagatgcttattaaagttctcaatcaggttagtggagtatagtgattgccggatagctggtggaaagtccaggaaagtgagtaaattcggcattttaagcagatctttgattaatttgggataggtctgatgccagttgttggcgaactcattcagtttcagttcggctgcttcacggttggcggcccgatgaacttgtttaaagtcactgatcacggccttgcggtcttttacgcgaactttgttcatcagattccgcccaacatgaaccaggcaacgttgtcgtttggctttagggaaatgccgattcaagccttcatccaaaccaactaacccatcggccacaaacaacagcacatctttaacgccctgcttgatcaaggttcccagcagttcagtccagattccagtcgattccgttggcgccacttggtagttcagcacttctttcgtaccatctggacgaatgccaattgcaatatgaacggcttctttttgaacggtatcccgctttaacggcaagtaagtggcatctaagaagatggccgcatattgtgaagccagtcgacgttgctggaaagcttgaacctgttcattgacggctttagtcatgttggaaaccgtggctttggagtagtgagcaccgtacattttctcaatgagttcggcaatttcagcagtggtaattcccttggtatacaactgaatgaccgttgtttctaaattatcactgtgccgaccgtaggctggcaaggtatgattttcaaaccggccattgcgatctcgaggaatggttaagttaagttggccgtacttcgtatcaaacgagcgctcataactgccgttgcggttattaccagtgttaatcccaacgtatgagtagcgttcgtaacccaaaaactctgccaattcggtttgaagcagctggttaatcgcaatttcgaggtggtgacgaaaaacttcgtccaaatcttgcttttgggctagtgcagcgataatttctgtggtaagttcattcatggggaatgcctcctgtgatgttttctgtggttactaaatatcataagggaaggcattccctatttctatacaattcagaaatcttttatgcatttacacaagatattttacgctctctacaaactaagctagtatggaaaacacacaaagttgaaggagtccaacaaactcatgaaagctctcatttgcctcattctaaatgcacttccgtatgccggtatcgcactgttgttagattaccggtatatttctgacggccctgtattgatatactttttggtgcaattaagcatatctctatcaatatgcttaattatgagggaggagacaaagaagatgtggcgcatactgtttttctcccagtttttatcattgcttctaaatctactgacgttatatgctggcaacctgccattctcaacctactttaaaccatttactgtttatggctggtctgtattgacccaagtgtttgggctactgttgcaggcgataacagccgggcttttcatatgggtgaaaagggttattaaagataaaaattaattggtaacgttaagtcagagttgtcaaacgtgaaaccattttgaatggccttttctcgaggaacatcaatcaaaaagttgatagttttctcttcattcgacttgatcatcggaagcggtgactgcggctgtagcgcgacttgttgattgtctgaataggcagtgaaatttgttggggaaaacgtcagcggaatggcgtaatgatagttatggaaagtgagcgaaatgccggtcttattttgaggtgtgttaggtagatacttggtttggatcgtaaatagcagttggttgttagcaccgtaataagttatcttgctaccaatagcaaccggttttcgataaactgatcggcgcggaatttcgtatgattcaagtagaggaatgatctttttgctagtatggcggtgacgtgaagttttcaaaatcagttttgttgaggtggcccgcagtcggtttaagcttaccgtgccttttttaaccgtcccagcagccaattgattgttattcaaatctttcaatgtatagctggtatttggctgggcatggaagctaagtttaaggccgttattgccaatcgttacctttacttttttcacgataggcggtttcgtttcatccgtattagtcttggataaggctgattgtcgcggcactaaaaagaagacggttaaaaagctaattagcagaactaacacgcgttttttcacgacggaggcctcctcgatttttgtgggttttaacgataaacagagggtgtgcaaaggttatacagcgacaggattaattattaataactatatcataaggaaattacgttttcttgaatgactcaaatatgtgccgccgccaaaaaacgtactagacgtcatgaaagtaacagtctagtacgttccagaaaaatggcgatcacacccgttcaacacggccacttttagttgaatttctgaatggatgccaatttacaaaattcaatgaactgattacctcaacaagcaacaagatacctgaccaaatcgcgatgaccaaagctccttgtcccagttgtaatcccggcaagtccacggactgggcaattgtgccattcgcaatgccccacacatgaaagaaactcagtggcaaccagctaattggcgggatcagcagcgcgctagtcaccacgagcaacacaagacttgttgttaaccaggcgttttttgagatgagtgccacggcaatattaaaagctgcaaccagtgcaatcagaagcaacaagaggcctacagaacgaatcaatagttgtcccctagttgtgaaagcttcagaaaagctgttgaaagcatcctgataggtgttattcagtacgggaaattccaagctgccaaaaccgcgtagcaaaccggtaactaatgttgttaacgccagcggtagaaaaacaatctcggctaaggtcaaactgatcgttaaaaactgcaccatcatctgtttgaccagaccttcaccttggagctgtaaccaatttgaatgggcgcgtttatgggctaactccttggcaaaaaaaccgcctgaaacaatgatgccgatgagcagaaggtaaaatggcacgttttgctggaaaagatattgtaaatagtcaaagccgcgaacataaaaagtagggaaccactcacgcacaagtttctcggtctcatctggcatcgcttgtaattcttgatccgtaaataacagcccttgcggataatatgcagttgttttgtgctgtgcgaggatttcattttgctgcactgtgcgattaacggcttccaagtaatccagtttagcagccccattcaagactgcaattcggtaagcggtgccgtcatttgtcttagtagccggttgcttaccacttacaactggtaactctgctgaaaaccaacgattataaacggcaggagactcgtttagttttttaagttcaagggttaacgtttcaggtctgtttgcttgatttgcaccttgccgaattaacgcttggcgatacttttggacaaattcattttgagcagcctgctgttgaaagttcccgaaaataccaacacccgtcaaaacggcaataagcagccaaatccaccaacgacgattgcgcttgataaattcaaactttagatagtgaaaaagcatcagatcacctccggattcgggcggcaaacagacagagaatttgccaaataaagtagataaggccaaagcggacaactgattcaagcaagttttcttgaaagagcacttttaaagattgcgcgacattagtagcgttattttgccagccatgatgaccgttgataaatggttgaccccatattttgctaataagcaggcttaaacttaatgcaatacccagcatcacgaaccatgtgagtaaggcaaccagaaaattcataccaagccatatccaactattgggctggtttaacataacccactcgtgttgcttgccgaaccaagataaggtccaagtcgttgacaagatcatcaccatcaataaaatcaccgaccagtggcttaacaggctgctgaagtctgttaagaaaactgctggtaaagtagaactgccattaatttcataaccctgatgagtggttaatagttttcggaaaagggatgcttggtgctgattggcaataagatcggcgctaaaatcatctggcgtcagtgtcttaagaatcttttcttgatcaaagactcttaagctagtttttaaatagtttcgattgtcaccttgggaaaaagcctccctttgctgctcatatagcctcgtcagttggttggcatgaagtaccttttgctttgcttgtgccacgctgaccggatttgtttcatttggatgattggcaacgtagatccaactgccattggcttgatgcaacgcggtttgtttcgccgccatctgagcgcgtatcgcttcatgggtttgctgctggcgaacactgcttattaaaaagaaagcaatcgcaccgatgacagcaaggccgagcgccaagctcaggacaaagcttgccgccaaacgccgccactctaaaacaaagagcgcttgcttcatactgttggtgcgaacagcgcattgtagcgcgcttcggctgaatcatgcggacctagcacttcttcatgaatctgatgtcctgtaatgaagaaataatgctgggtgactttcattaattcgtctagattatgcgatgaaattaagaccgtcacgtcttgttgggcaagatcaagtaatgcctcgcgaacaagttgcaaactagttggatccaatccattcaatggttcatcgagtaagaggatcgtcggtttaacaaccagcgccatgaccaacaacaacctttgcttcatacctaacgaatacttgctcacccgttggttcagaaaatcgactgcttgtaattgcccagcgatagtcgcaactgcctgtcgatcaagtcgatgaaccgccgtcaaaaaatctaaatgttgctgtcccgtcaaatatggatagaggactgaattatcttgaagatacgcaactttttcaaagatcaattgacgactcattgattgatctagtaattgaatcctccctgattgtgggtgcaataatcccgtcagcaaattcaacaaggttgattttccgtagccgttaggggcaaccaaaccatagatagcatgttggttaatttgcatacttgcatgactaaaaatcgttttgccgcggaacttaaacgtcaaatcctgcacagatagaatcatagggcccctccaaaaataacttcgcttgatagtagcagcgtcgctaaccactattgagatgatcagaataaatccgataaaaacgcttgatgtagtttgtgatcttttccctgtgaaagaaatagttactatccttgttgtctatatgatttcaggtgttattgagaaaataactgcatatgcgcgcgctaattcgattgttattctcaacgaaaataacgagagacaactgatggggagtacggcgcttggataattaagaaaacgcttactaacccttaatttaaggtagcatataccttttggacaatcaacggtttttgtgaacatgaggccgtataaacgccccgtttctgcgcttaatataaatataccaatattataaaatttaaattatttcataaagataaggaaattttctcataaatagacattagcaggtgcaactattcctgagttttagatcttcacaaacgaaaataaaatctgatgtggccgttaagttaatcagttgactaggaaaatggttcagttttgaatattttgttttcggcaagcttgcccaattgctgcatacattagtcaatttgcgactttggaaaaagatgatgatctggatgtcgtcttgtcactcgaaagtggcgagtcagagtttccctgaagtgttacgttgtttaaaaatattgtgcatgctctctagcttgagttacttgtagcaagagaatgcaaaaagcgcaacctcatgttggtactgaagttgcgctgtgtttctgatccgagtgtgagtcgttcatgatgaaatcagctacttgaaaagccttacgctagttaaagatatcagtggcagcctgcttaagttctttcaccaaagagggcttggcgtgacccactacttcaagatggcgagcggcggcatcataagttggtaactgccaaaggacgatattcccctttacgccgctctcgaagtcagcaaaaggttttaacatttcgttcatgaatttatctgatgaagtcacgaacataccaatgaccattcctgttgcctcgttataatcgtcatttgatagaacaattagtggtcgccgaatgttgccggcattgagattgtgacctccgtattctttacctaaatgtggctcagcatcaacgaaaacaatgtcaccttgttttggcgtgttctgggtcatacttctttacctcttgatggctcttcagaaacaattccgatctcttttttcatcgcttcaaaatcaatcttttgaatagctttcgtgtgccacgggttaattcgttgtggctcatactttaacgtaccctcatcatcaacaagtaaaagatattcttgaccttcgttaacgccagcatcggcaggtactgttaaacttaacgagttgccagatcgtctggtggtaaaacgacctagtacgcgatcatggcctttttttgtgtccattagaatccctcccgtaagtacaagtatatacgctttgcctagtaagtacaagtacatacgggtatgtaaaaatcttacgattaaacataattactaatcgtcactggctcggcgatttatcaaaaattttagacatgtgaccactcgggaacaaaaaaggtcttgacgaggtcttgaggctagtcagtgacccttttgcctatcggtctgaaagtcatcaagtcacacgcatggggcgtgattggctagttgattcaaattgttaccagtcggtgcagggaaagatcgatggaaccgcctcttcgtgacagaaattgggtttgtgtaccttaatgattcggtgcaagcacgcacggacatgccctgggtgtgcggtttctaggattctcttattggtcaatggcaagccaacaattaatttaaaggtactaggggtaggggatcatgaaaacgaaccacctctctgcaatgctgcaacttcccctatgcggacggcttctggctggaatcgatatagagttgaaggttcctgttgcttgcccgtagtctaacattctccgttcggatgaaaacagtttatttgctagacaaattgcgtaacgagctctctagatcccataaaaacggtcactgttcggcaacagtcatgaaaactggatattttcgctgtttttgcagttggcgtagcaggcttaaatggcggcgataaagtgacaagaatataattcggaatattgagccattgaattatgcatcaccgttgtaactagaagtatacagcccgtacataataagcttgtccgggatttggattattaactccaaagtagaaaagctgatctgaatcgactttgtaaggtgaacttccaccgttaaataagcggttcttacaacagcggtagcctcagcgcgatcaggtatgaaacaggtaaagtttccaccattcactttcattactgcccagaggcaatcttttagtgcaaacatataaccactgtagcgcattccggcaccggaaaatgtttctgaattgaattcttgaccgggttttaaccatttgatcgtggtaggttgttgcggagttcgaagctcaatagccggttcttgtggtgcagaggataaaggaacctgattgtcatttttatcataaatgacagtttatactgcggcagtgctttgtgagggggcacgggcaatggcaattgttttctgcaacggtgttattgtgattagtccaaagatcagtattggcagtgcacataaaagagataacctatatttattcataatatatttccccatccccattgttctcttatagaatatcataggagacgctttatctatcagcagtgtttttgtttttccacaatatgtataattcgttgagcctcacagaattttaagaacttcagttaaaaaagatagacaacttttaacgcaagaggtagtatagatgcgaacatatgttcgtaacacgatgacagacgtgtcgtcaaaaatacctataaaggagttttcaaaatggcagatgaagcagtacgggccgttcaaaaatggcttaacaaaacgtatgtcaatgttcctagctttgtaaaggcacctgaaaacggccaaactggatgggcaacaatttatagtttacggatgggtctacaacacgagattggtattagcgctattggtgagggctttggagatactacaaaagccgcattagcacctgtagtcggcaacctaaagcctggttatcaaggcaacagcacaacttatccaaggtgctttttggtgtaaggggattaatccaggtagtgattttaatcagcgcttttctgatgctacagctcaggcctttaagacacttcaacaggacgcaggtctttcagctgatggtgttgtgacagtgaatttgatggcggcattatttgatatggcggcttttagtttagtttcaggtggatcggcaaaagttcgatcaatgcaacaatatcttaatagtcgctttagcaataatattggtatcttaccttgtgatggaatttatcaacgcgatactaatactgcgttgatatatgctttgcaacgggctgaaggcatgacagctgatgttgcaaatggggtttatggacaaaagacgattgataattctccggtcttgtctgaaggttcaactgatgcagatgcagttcgtgtattgcaatatggactcctagtaaatggatttgcggatattcccacggatggaaagtttactagtgtagtaggcgatgcagttgcggcatttagcacgatgatgaatttagaaccaacaacgggccgagtagctggtaatcgcgtcattaaagggctattaaccagcaatggcgatactacgcgggactcaattgcttgtgacacgtcaaaacagctgactagcgctgatgttgcattgctacgtaaatacggttttagcatcgttggccgttatttaacaggctcagttggaaatgcctttacccctaaaaacctcacaacaactgaaataaaagcaatcactgatggcggaatgagtgtatttccaatttaccaagatggtggggctgaagttgaatattttaccgaaacgcaaggagttcttgatgccatgacagcagcatcaacggcacgcgttttgggctttccaaataatacaattatctattttgcttgtgatgttgacattcaagagggaaacatcgatgcaacgattacagcgtatatgcgaggagttaattcagggcttttaaaatcgggataccgagcaggaatttatggaactcgcaatgtttgtgcccacattttaaaagctggttttgcagttcgctgttttgtgtcagatatgtcaacaggctattcaggcaacttgggttatgcaatgcctacgaattggagcttcgatcaatttgttgaatacagtattggcagtattcctgttgatcaggttgcaacggatgtcaaaatttcggacccaggtgcgaaagtgtttacacctggaacgcttccagaagcatcaaagaaagtggtcgctaacgatttgctaaatgggctgatcaacaacttaattacgtttgagctcggaaaggagtatccattaccagttcaaactccgcatgtagaggcattttggtctgtaaatagctcagcaggtaaaggggctgttcatataagcaagggcggctttgataaaatagctttacacagcgcagtggaggaccaaattggtaagcttaacaatcccgtggccttcgatgaggcacttgacaaatacggcattgttaaacttggggccaaggttgatgaaggatcctttaatgtagcaattaaaactaatgggtacaatcttgaggtttcgctgaccttgaatattatcaaggccaaaaagctttcaaatgttgatgttaatatgtctattgcatggagggtagtgtttaccccgctattctggtacgatcatccggagattgcaccggcaagacaaaagagctatgcgtttggagctgtacttgatttgagtagctatatgggtactagttatgcaggagttgaatccgcggctatattagccgttgcagtcgtaattatggctttgattgcaatctaataattatgacgactgttgcataaatgaaattgtaagaaaaaaggaggtgctgcagccgtagagctgcagcacctcctcttagtatactcacataagtggggttacttatttctgaggagacacaaaataagaaatactataaacaaaatttaaatgggaattgccagaagcttgtatgccatagggtcatgcagaacggcgtttgcgatagtcgatgagcgtgatcaatgtagcaataaatgaaccgccaagcagcaataaagagattaattgtacaatcggtgctgcccaagcattctgaaggacgctgacaggggaaaattctgactgggaaagctgcaaaatcaatattagaattgatgttaatataacttccagaatggttactacaagagaaatcgtataccctatagaagtaggatatacttttcttaaaaagacacgcacaaagataatgatgacaagcattgttatcgccgccagtaatgagactataaggggaggaaagtatgcggtttggatagttgtcagtacttgtttgctagaagtgctaaggctaagtggcatagaaagcgtgaagatattttgaaaattttgagtcattaaaaatacagataagataaaggaggagctaactactattacgtttatggtatgtatatcgtagttttttttaggaagtggcatatttataattctcccctatatgattgaagttatcaaatgtaaataaatatattagttatagttagacataaggttaatcgataagacggatcagtccctatttctttcgcaattataaacgcgataaagaaactaagcaataagaatcaaccaagttggtacagcaatgcgctactggccaccatcaccttttcagacaatcaattattcagactatcttcgtatccgagtgatcagatgaaattgagccaaatatcagcaagtaggcgattcagtatcactaccaaaagtttttgtggctgggcatctattactgatagggatcatgatgtcaaaaaagctgattccatgacggaatcagctttttcgtttataaaaagttctccaacccaacaaccaattcatccatcgtttgcaccttactaatcgcgactgcgacgccttgcatgaagctttggcggtcgaaggagtcttggcggatggtgagggcttcaccgggaccgccgaagaggacttgttcgtgggcaatgtagccgggtaggcgaacggcgtggatcgggacgtcatcgacacgttggccgcgggcgtcattgtcgatggttggcaatggcttttgggtacgtccggcggcgattttgtgggcagtggcgatggcggtgccagaaggggcatcggctttgtcctgatgatgcatttcgatgatctcggcatcagggaagtaggcagcagctgcttgcgcgaatttcatcaaaagcactgctgagagtccaaagttcggggcaatcaagccaccaagatgtttggcattggcaagtttgatcagtcgttcctgattggcagggtccatgccgctggtgccgacgattggatggatgccggcattgatggcagcttcaatgttggcagctacggcgctgggattggtgaagtcgacccagacatccgccacgtgtgcatgaagctggtcataggtgttgagtacttgcacgttggcaggcaagttgtaactttttggattaaggtcggtaattttagggtcgaaaacggcgcttaatgcgaagtcttgatgtgactgaaccattttgactgttttctgacccatggcaccacgaaaaccggcaacaagaacctgaatcatgcgagcacctccgcttcaatggctgatagttctggcacgcccagtagatgggcgagttcctgctgttggctggcgttcaggggtagtaacggcaaacgtgggctgccgacttgaaagcctagcgcattgagtgcagctttggttggcgcaggggatgggaaatggaatagagccgccatttttggcaacagttgacgttgcaaggcggcgactgtggtgatgtcgccacgatcgagtgcggcgtacatttcacggatactgtgggcgtaaagatgggccgcaacggaaatgactcccatcccaccgagtgtcttgatgttgagtgcctgagcgtcttcgcctgtccaaacgttgaaagcgtcgtgcttggtacggtcaatgatgtcactcaaggcagggaggctgccgcattgcttgatgccttgaatcatgggattttgcgccagtgtcgcaacggttgctggtaacatatcaacaccggtgcggcctggaatgttgtaaatgacgatcggcttctgcgccgctgcagcaacggctgtgtaatgggcgatcataccgttttgatctggcttgttgtaataagggacaacaaccaaggtggcatcaataccggcaatgccgccaacttcatgagtgaaggcggcggtttctttggtgttgttagaaccagaattagcaatcacaagtgcgcggccatgaaccatatcggcgaagcgggtataaagcgtgattttttctggatgactgagtgttggtccctcgccggtggtagcaccgacgacaaaaccgtcagtaccttctgcgattaaatgatcgacaagtcgctgcatgacgccatagtcaatttcgtcgcgatcattgaatggcgtcacaatcgcggtgatcagttctgctttttgcatgatgaccctcctataaacgcgctacccagcccagaaacctacacataaggaccttggccgcaatggccacttatgttccggtttctacccgcgccagttcgcgctctgtcttaatgtaactactaatgataatttgtgctggcttacactttttcaagcattcgatgttcaagaaagtgcacaacggcggtgacaccgggcacgagtgcggcttcgtcaggtgaaaagtcggctgcatgtagttgtgagtcagggtcattgacgcctagccagaacatggtgccaggaatcttatttaataggtagccaaaatcctcaccggtcatgacaggctttgtatcgacaaatgtcacgtcaggatcatctttcatcacttgaataaagtctttggtgagtttgtcattattttcaacgggatagtagccgccttggttcaaggcaactttgacttggcagttaaaactggcggcaatgccttgaccgatgtcgcgtattcgttgttgcagaaagtcaatctgctgctgggtgaagccgcgtaaagtgccttcgagatgtgccctgccggcaatgacattgcggatcgtacctgcgcgcatcaagccaaaagtaatcacggcgctgtcggttggtccgacattacgggcaacgaccgtttgaatctgactgatgaagcttgccgccgcgacgatcatgtcattggcattttgcggcaaggcagcatgaccgcttttgccgatgaggtcaacgttgatttcggttgtgccggcaaaaagggtgccgaggcgtgtgctgatcgtcccagccggtagatctgggcgatcatgcaggccataaaactcatcaatgtgccaatcgccggtgaatgcgcccatatcgtaggcgagcttgccgccatttttactttcctcggctggttggaagaaaaagatgaggttatcttttggttgatgttcagcaaaataactgaggatgccgagggcgacagtcatgtggatatcatgtccgcaagcgtgcgcgatgccggaatgcttagaggcaaatggcaacccggttttttcggtaaccggtaacgcatcgatatcggtccgatagccaatcgtacgctgcggatcgcgcccttggaccttgacgagtaaagcggttggcaggtctggcaaggtgcggatggtgagatatgtttggggcagcccttgaatggtttttagcaataaggcgtgcgtttctttttcctgcaaggctagttcggggatttgatggagttggcggcgaagggtgatgaggtcagcttccttcattaataagtcacagctttctgagttcgtcgagtaggacggttttggcttcggtttggtcattcacttgtttgatgactttcgcaggaacaccagcgactacggtgtgcgcgggaacatcgttaatgacaaccgcgccagcagcaataaccgcgccttcaccgactgtggtgccttcgaggacaacggcattggcgccgatcatgacgtgatcaccaatcgtgacgggcttagctgaaggtggctccacaaccccggcgagcacggtgccagcgccgatatggcagtgcttgccgacgattgcccggccaccaaggaccgctcccatgtcaatcatggtgccagcgccgatttctgcaccaatattgataatcgcacccatcatgatcaccgcattgtcgccaataagcacctgatcacgaataatggcgccaggttcaatgcgcgcattagccgccttgatatccagcaatggaaccccagtgttgcggccggcggtttcaacataatagtcatctaacttggcttttttcaaaatgggtttaatttctgcccagtcgccaatcacggtgccggtatgtttaccgatgaaagcatgaacgcttttggggaaatgcagctcgctgagtttgcccttgagataaaccttaactggggtggtttttttgctgttagcgatggtggaaataattttttgagtatctaactgtgccataatcggcctcctatttggttgcggcagtggcgtcggtttgagctggagcaggctgctcagttggtgcggcgtaatgtaagtcatttttaatgagatcagcatcggtttcgcgggtcacgaccaactgggcttggccattttccacgaaaacaacggcgggtcgcggattgcgattgtagttggatgccattgagtagccgtatgcgccagtgtcaaaaacaacaacgacatcgcctggtgtggttgtgggcagcggtgcatcatcgatcaaaatatcgccggattcgcaatacttgccgaccaagtggacatgttcagctggcgcagcatttggctggtcagctaaaacggccgtgtaggttgcttgatacaaggcaggacgaatattgtcgcccatgccgccgtcaacggcaacgtatggccgcaatcccgggacatctttacggctgccgacggtatagagactatagccggctggcccgacaatcgaacggccgggttcaatccagatggctggtaacggccagttaagcgtttgactttgtgatttcaaggttgccagaattgccttaacaaaggcttctggtggcagcggatcgtcttgcttggtataagcaatgccgaagccgccgccaacgttcaggactttggggatgaagccgaattgctgatgccagttattaaggacatgcagcagcttttgggtaacggcttcgaaacctgctacttcaaagatctgggagccaatgtgggcgtggatgccaagcaggttgagatgatcgtcggctaaaatgcgcttggcggcttcatctgcttgaccactagcgagatcgaaaccgaatttactgtcggtttggcctgtctggtcataggcatgtgtgtgcgcgctgataccaggggcgacacggattaaaacgtcctgttgaccaacggtggcacctaaaaggtcatcaaggagatccagttcgtgaaaattgtccacaatgatggtgccaaccccggcatccaatgcttgtgtcagttcagctttgcttttgttgttgccatgaaaactgaccgccgccattggaaaatcggctgcctgagcggtgtaaagttcaccgccggacactacgtcaacgtgcgcgccttctgacttggcgacttcgtacatcgcaatggtcgcgaaggctttggaggcataactgacggcatatgacacatctgcttcttcaaaaacacgtttaaatgcgcgaatttgctggcgaatggcgccaacatcgtacacataaagtggggtttgaaatgttcgggccaactggctggcagcgaccccgccgatggttaattggccttcatgatttgtggcaaaatccataagttcatcctcccgaatttggcagggcgatggcaaacgaaaagggatcctcttgtttggccacgcgtcaaacaaaaagatcccaacttgcaatctacttgaatgatagcgccccgcttaggtttctaagcgacagtacaggatttgttcaatcctggcccaacaggcttgccgatcccggcgcgcccatttcggcaaccgcccctttggcttgatgtcatcacgaaggatcccgctcgatcaagctactcatgttggttgcaacctctatctgtttgtcaccagcctataataaaaagacgtggacgtcaaataaataatgagagagcgcgaacaggcccgcttagaaaccggagcataagcggcctcaagcctcaatggctgggtcttggccagtgaggcttgaggtccttatgtgcaggcttctgggcctgttcgcgcgttttaagtgagataggtctgtcttcgaggcttttagttctcctatagttggcatttgtctgatagtccgagctggccctgcggtgacagagactggtgactgtgaactcaggtcattaaaaacaaatttaaaaacattgtctctatgcagtaacccgaaaacgtgtcatgttagcgacatgctggggcttgtgtttctgggagagtctgttaaagtacaggataaaatgacaaagttctcatttgtcgtgacgtctaggaggcagtttatcgtgcgtgtcgtaaaatttggcggttcatcgctagcaaatggttcacaattcgccaaggtcgtggcgatcatgaaggctaacccagctcggcaggtgatcgtgacgagtgcgccaggtaaacggcacccgggagacaccaaggtgaccgatttattgattcagtatgcacaggcagtgatgcggcatgaagctgtggctgccattgttgcagaaatcgttgctcgatatcaggcaatcgccgatgattttgagctcgaagcatcgatcatggccgcgattgaagaagagctagaccagttaccaaagttgactttcaagaacgatgattatttaatgtcaggctttaaggcgcgcggtgaaaagttgaacgcgtttttaatgaccgcggtgttgaatcatgaggggattgaagccacttatggcgaaccgaagtcgttaggaattgtggtcacagatcatcccaatgatgccgaagtttcacgtgaaacctatcgcaacctcgctacatttcgacgaccaatcggggttttggttgtaccgggattttatggctataccagcaatgacgatattgccaccttttctcgtggtggctccgatatcacgggagcgattttggctaacggttttcatgccgacttatatgaaaactttaccgatgtcgatggcgtagcggctgctgacccacgggtggtggcgaatccgcaaatgattcgtgaaatgacctatcgggaaatgcgagagctgtcttatggcggctttggtgtttttcatgatgaagcgattctgccagcgattgctgggcaggtaccgattaatcttaaaaataccaatcatcctgctgctccagggacaatgatcgtcccagaacagcattttgtcccgaagcatgccattaccgggattgtaagttcccaacattttggggcgatctacctgcatcgatatctgttgaataaggaagttggcttcactctgaagatccttcaggtgttagcccacaatggcattagttatgagcacatgcccagcggaattgatgatctaaccattattttagatgatcgccagctaactgaggccaaacgcaagacaatttgtgccgagattcaagcggcggttcatccagatgtgctgaagtggattgatgactatgcgatcatcatggtcgttggtgaagggatggcgcaacgaaccggattgattcaaaccattctacaaccgctcgcaaccgccggtgttcatgtctcaatgattaatgagggggcctctcagatttctctgatgctgggaacctcacgtgattcggccaatcgcgctgttaaaacgatctacaatgctttttttataccgattaatcaacgtttggaggtgcactaacatggtgactttgcaaaaggttcatggttccgaaaatagtttctttcttttcgatgaaacgcagttaactcagccgttgacaaacacccaattagcaactgtgacccaacagctaacgaacgctgaaacagggttgctgggcggtgcggacggggtcttggccgtcacggcggcgccgggaacggctggcaaaatgacggtggtcaacactgatggtagttttgctaaattgtgtggtaacggtctgcgcacggttgcacgttatctgagtgaaaaaactgggcaagcgacattcaaggtgcacacggattttgctgatcttgccgttgctcgtcagccgcaactggcagaaggcgtaccggcctattcagtggaaatttcgccggttagttttgcgcctcaggacttgccgtttgccaatcttggcgttgaccgaattgtggatactgttttgccagcgattcatccgagcttgaaattcaccgccattgctgtgcccaacccgcacttaattgctttcgtctcacctgaggtattagctgggtccgatctcgaacggattggcaagatgctgaatgccaaaaatccttattttccggaaggggtcaacgtgacttttgccgaaatcttagataaggataccttatttgctcggacgtatgagcggggtgtcgggttcaccaatgcatgtggcacaggcatgtcagcaacgaccttggcttttattttgacgcatccagaggaagctgcttttgatcgggtcaataccgtgtataatccaggaggaatggtcaaaacaattgtccatcatgacggcgagcgttactggattgaattgatcgggaatgcaacggtcacggcgacaattaccttgccagacacggcgttactcgcaggcgactggcaacaagctgagattcacgcgactggcgaacaggctgagtatgaacgatttattgacgcactgccgcatcggaagttagcaaacacattgacagaaggagtttagatcatgagaggttatcacgtagcagttgttggggctactggagctgttggcacccggatgttaaaaatggtggcagaaagtaaactgccgattgcgtctgtcttggcacttgccagcaagcgctcagaaggaaagcaagtcccttaccgtgatgggacgctgaccgtccatgagacgaccgatgattcattcaagggcattgatattgccttattttctgctggcggttcagtttccaagcgatttgcaccagccgcggttaaagctggggctatcgtggttgataatacgagtgcttttcgaatggaaccagaaattccgcttgttgtcccagaagtgaatccggaagcgttgcggcaacacagtgggatcattgcaaatccaaactgttcgacgattcaaatggtcactgcgcttgaaccgattcggaaagcctttggtcttaaacaagtggtcgtttcgacctatcaggctgtttctggcgctgggcaatcagctgtcaatgaattgcttgatgaaactcgcgctgcattggacgacaaaccgcttgacccgcagattttaccaacggcgggtgacaagaaacattatccgatcgccttcaatgccttgccgcaaatcgatgttttcgaaccggatggctatagccatgaagaatggaaaatgatccacgaaaccaagaaaatcatggctggggatatgaatagcgacaccatcaaagtgaccgcaacctgtgttcgaattccggtgccaattgcccactctgaagaagtgtacttcgaagtcgaagacgacaaggcaactgccgatgatattcgcgaggcattggcgcatgctcctggtgtcgttgttcaagacgacccaagccaacaagtgtatccgcaagcgatgaacgctgttggcagcaaagctgttttcgttggccgcattcggccagatgcagaaaacccacgattcttccatatgtggaatgtttccgacaatctattgaaaggcgctgcttggaattccatgcagattgctgaaacgatggatgccatgggtctcattcaacctaagtaaatcattcggtgaaaaagccggtatcatcattgttcaggcggttctgaacagcgacgatgacggcttttttgttgctttgagattgttcaaaaataacgcccggatttcttgcgagaagcttaaagttggtacgcaaagattgaccatccagattaaataactataatagttaaaaaacaaaggagcagttgtcaaatgaaaaagcatcgttttgtcatcgcactggtgggtctgtcactctttgccgccagcagtacgattgcggctgatatgacgcaggcgaatatggatcaacacagtgtgacctacacgatcaaaggcgacgggttagtcatcttcgacaaaactcgaacctatcgaacaaaatcaaccgctgctgcctataaaggaactttcgccgccgatgcaccaacggccagctttgaaaaggtcgggacactggctaaccacaaggactatcacgttacccgcaaaattaaagtaaaagctaagatgcaaggcgctgctgcacagacctttttctatgtgaatgggcatggctgggttaaaggcagtgacttgacgcgggagtgatttgttttaaaatcaataccttcatctaatttaaataaccgtgatgaatcttttatatgaaaaaggttcatcacggctttttatttccttatcagatgtatgaatatatttatggtaataatagttgacgtagcactggcaggcactatacaatcaaagctctcttgatggactagtctcatcacctcatacgtgagtgaggcttctaagctagagatgacgcatcatagttttatctacttctagaggatgtttgaaatgcgagataagcaaagggggggtatcctgtggtaaaggttcattttggtctcactcataaaaaagttgattcagttctaatcattcaattctttaacgccggtattatctgggttcataactcaaagcgccgttgggagttgactggtggcaagttagaaccgggcgagacgatggtgcaagcagctgtccgcgaatcgtatgaagaatcaggtgctgttgttcaggccagtgcaattgtgccgttgggctactatgttttacccactgggcacacgacagcggtggttagtgctaaagttgaacgtttgcaagctattcctgcgtcttctgagattgatgatcggcaagtatggtttaagcctgtcccggatgctgagcgatcttttcatgatgatatttacgcccagatttttcaacatatcgggtggccggatgagtagccgccaatacgggtttctgctgaatattttatcggtagccgtgatggctgtgacaccggtcatgaacaagttctcgatgatcacgctctcgccattagccgcaagtttctacaatgcgctagtgtcattgatcctgactttgggcacgatcgcctttaccaaaacaaaattagtttggattaagcagccgattatttggacgttgggtttgacgaattgtttaggcatatttttgcaatatatgagtcttttcttccttgatccggtcagcgtcgggttggtcggcaggttttacattgtctttgcgatattgctttcagtgcttctgctacgtgaacgatttgatcgaaaagagattgttccgatcgtcttatgtatgattggcacagctttggtatctgacttttccggcgatgttaataacatactagggctggtctgtgcgcttggctacacgtttagctttgccctgaccaacaccttagccaaaaaagctcttatcaacatagacgagaagatactactcttatataaccaaggcaccgccgtcgtcattctgggcggttttttactcggaagtggccaattatcccttgcgccgaatcttggcatgggtgctgtcgccatttcagctttttgttctggctttttgggactgctactcttttatcgcggcctgaagttgatttcatttcgcgatgctaatcttattcgggcattgaatcctatttttgtcttagtgtattcattgccgttcttcacaattcaaatgacgccagcgtttctgcttggcggtttctgtatcattctttcgattgtttggatgtcattgccgatgaagaaggttggcgttgattgagatgaatgtttcttatacgttcagcgaaagtataaatggcatacaaaatagatttattaaagtatggcgcaagaatgctttctttttattgttcaataaatcatttctttgttgatgcgaaaaatgaaacaaaaagttgctgcatatattcgctaataacaggtgctattgccaagagctgaagttgcttggtagtggcacttgttttccttttaggatagagataaatattttagaaccatcaaaattacttggctgataaccatctcaaaatatatcgatataacagcattaaccatattatgatctcttatagataataaaatacttcgtttttagtagactcttatgtataataattggtgtaaacaattgcctgtgggtgttggcaatgataaagccagaaaacattggagggaaatatgaaattttctagacgttcaaaaaggtttgttatagtcagaagaagtgccgcagtcgtttttgccctgattagtatgacactattttttcaatttaatagtggggttgaggtccacgcaacgactaagactgagtttaatgacactgaaatcaacagagaaacaagtgaacaattaaaaatgatcgatccgtacttaaagaatgttgatggtatcacaagttttgactatgatgctgccatgcatgacaatgttgatcccgttgtcctaaaaattggcgcagaaataaataaatgggctcgcagtcttaaaaatgatggtccagaaaaaggcatgctgctctcaatggctaggtttaatttgctggtgtatggaaattattgcggtaaaggcaacaacggcaaagcgccgattgatgatcttgatggtgcctgccaagcacatgatacatgttatgcgtggggcggaaacaatgaaaaatgtaatcaggaatttcgtcaacgcttattgacaattatgcagaagacatcgctttttgattacaagcacattgttgccgttgcggcatataagttgtttggtggttgaaaatcaatcatgaataaggcttagaagaaggctttcgttttatctaaagggatctgccaaaggcacttctaatggagaactgaaaaatgaagactaaagcgaaaatggtcattggtaatggcggtatcttgactgttatatttgccttaatgaccatcataactttctctgggaaaaagaacttcgttggaatcgagcttggcgctgggtttattgggctattagtgattgccttgctgattatctgttggcaaatttaccttttattagaaaagtccgcccttggctggagctttaacattatcctcggtagttacacattggttgttggagtagccatttttttcattgcctcatttttcattggctttgcgctatttccgtgattttcccacctaggaataacggtgaagggcctgggctataatgcgacgttaccaaacagactagtgagaatgatttgccatgtttaggcaaatcattctttttatgtttccataaatagtctggttaagtttaaagattgtggcgtatggcatggcaagccacttcatagaccggccttgttgccactattttgtaaacgtgatgctatcaagcaatggctaggtcactcgcagaatctaattgcacagtatggtagaatagctaaagaaatccttaagtatctgcgctaagtgaaagcgagtttttctatatgaagaaattgtttgagcggattcgtatgccggagtttcttgaagacatgcgaatgcgatatgcagctattgcgatggtcgtgctggcggtgatcggtattctgatgggagcactgatccgtccgtggttggctttgttgatgctgctgattttgattggtctagtggccacgattttttatgccctagaaaccattgccaagaataccaatcagtatatttcggatctcagttatcggatcaagcgtggcgaacaagaagcgctgatcaaaatgccgattgggatcctgatttatgatgagaatctcaatattgaatggacgaacccattcctgcagaagtattttggcgacactgacgttcttggtcagccgttggaacatgttgatgcggaattggctgagttgattcgcagcaacgagaacaccaatgaaacgaaaatggtgacttggggccagcatcagtttgagattatcgtgcaaaagagtatcggggttgtctatctgatggacgtgactcgatatgctgagattgaagagcgggcagaagacgagaagatcgccattggccagatcttcattgataactatgacgagatcacacaaaccatggatgatcaggtcattactaatttaaatagttacgtcacgaatcagctgacggattgggccaatcaatttggcatgttcttgaagcggattgacaacgatcgctttttcctgctggcttatgccaagtcgctgaaggatgttgaacgtgacaagttcaaaattctagatgtgattcgggaagaaacctcgaaacagaattatccattgacgctgtcgctggggatcgcatatggcgatgaagacttggctcagttagcggtgacttcgcagagtaacttggatctggcgcttggtcgtggcggcgatcaggtggtggtccgcgccaagggccacgaagcccgtttctatggcggcaagacgaatccaatggaaaagcggacgcgtgtgcgggcgcgtatggttgcgcaggccttgcaagaattgtttaagcagacggacaaggtctttgttgtcggccataagcggccggatatggatgcagttggcgcctcgatggggattcgccggattgcgcagatgaatggcaaagagtgttacattgtgattgaccctgaccatctgcactccgatgtcgaacgcctcatgggccaagtgggtcaagatcctgaagttgctaatgccattgtgacgccggaagcagcgctgtcgcaagcaacggatcagagcctgctgatcttggtcgatcacagcaagccgtcgatctcagcggcgcctgacttgtacaaacggttggcggcaagaacggttatcatcgatcaccatcgacgcggcgaagaatttccggacaacccgatgctggtttatatcgaaccgtacgccagctccacttgtgagctgattgcggagatgtttgaataccagccaacaaatgtgccaagtcttgataagcttgaggcaacggcgatgctggcagggatcacggtggataccaagtccttcagcctacgcaccggcacgcggacgtttgatgctgccagctatctgcgttccatgggcgctgatggcatgttggcgcagaacctgttaaaggaaaatatcgacagcttcatccaacggaatcatttgatcgatacaattgaaatgattgcgccaaatatggcactatgtactggggaagaggataagcgttatgacccagtgattgcagcacaagcggctgatacgatgttgtcactcaatggcgttgatgccagttttgtcatcacaaaacgcccaagcggtgatgtcggcatttccgcccgctcgactggggatgtcaacgtgcaggtcatcatggaagccatgggcggcggcggtcacttgagtaacgctgccacccagattaagggcaaaacgatcgccgaagttcggactgatctgcttgctcagatcaagaaagcagacgaagacgcatagaaagcagggattttgatgaaagtcatctttacacaagacgttcgtggcaagggcaatcgcggtcaggtgaaagaagtacctgacggctatgctgaaaactttttaattcgcaaagggctggctaaagcagcgaccccgcaagcgatgagtgctttgcgcggccagcagcggcttgaagagaagaaggaagctgaaaagaaaaccgaggctgaggccatgaaggctaagatcgaagacgacaaaaccgttgttcagatccaaagcaaagccggcgaagattcccggttgttcggttcgattcctagcaagcagatcgcgcaggctttggataagcaatatcagatcaaagttgataaacgtaagatcgatctgaagcagcctatccgttcactgggtttcactaatgtcacggttaatttattccctggcattgatgcccgcattcgggtacacgtgattgaacaaaaataagaatagttattctgccagaagacgcgaccagatgatcgcgtctttttgtctatctggtccaaattagtgggttgtggactgagtcaatcaccggtgatacagcagtgaccattgcttttcgttaaattgtttgtgtagttcgactgtatgcggtgatgcttgtcttgactgcgggtttaacgtagactgttagggataagcgacaaaaaatttttgacgattaatctgaaggaggacgcgcatggataatcaattaattgaccagcagccgccgcatagtgacgaagcagaacgtgccgtccttggcggcatttttctgaatgctgacacattgccggatgcacaagagtatgtcacggcggatgacttctataagaaagcacaccggctgttgttccaagctatgaccgatctacaggataacggcacagcgattgatacggttacggtgtcggattatctggacaatcataacaacctcgacgatattggcggggttggttatattacagatttggttgcggcgacgcctattgccagtaacgtggtatactacgccaaaatcgtgcagcagaagagcacgttacgcaaactgattagtacggcgcaaaacattgccagtcgcagctatacggaacaagacgatgttgaaggactagttgaagacgccgagcgccagattatggatgtctcggagaaccgcaatcaggccggcttcaaacagatcaaagatgtgctgaatcaggctatggcgcagattgatcagttgtatcaaaatgatcaggcaatcaccgggttgccaaccggtttccgtgatttggacaaaatcacgacggggctgcatgaggacgaaatgattattttagcggcgcggcctgctgtcgggaaaaccgcatttgctttgaacattgcccaaaatgttgggacgaaaacagacaaaagtgtcgccattttcagtttggaaatgggcgctgaacagctggtaaaccggatgttgtgttcagaaggtagtattgatgctaatcacctgcgaactggtcagctgaatgaagaagaatggcagaacttgattatcgccatgggtagcttgagtaaggcgaagatctatatggatgacacgccaggcatcagaatggcggagattcgcgcgaagtgtcggcggctagcgcgtgagcaaggtgatttagggctgattatcattgattatttgcagttgattgaaggttctggccaagaaaaccgtcaacaggaagtcagcgccgtttcccggcagttgaaaaaactggcgaaggaattgcatgtacccgtgattgcgttgtcccagctgagtcgtggcgttgaacagcgacaggataagcggccggtgttgagcgatattcgtgaatccggttcgatcgaacaggatgccgatattgtggctttcctgtatcgtgatgactattaccgcgatgcagaaggcgatgaggatgacgacgatcaaggcggcaatgatgacggggatgataatgttggtgaagttgaagtcatcattgagaagaaccgttcaggcccgcgtggtaccgtcaagttgttgtttgtgaagtcgtataacaagtttacgaatattgcctataatggtccggatcaataaaccattagcaagaaagattagaaagttatttttagatttaagcgcaagaaagtgagggatgccgcatggatgccattttgatgagtttaatgacagcactcaatgaacacctgctgatcaatgtgtatcagcgcgataccgacgatttttacaccggatacgtacaggtgttaggtcatgatgcggttgttctgggaacctacaatgattcagggattgccgatggatgtgccttgatcgcattttctgcgattgatcaggttgaatttgccggggatgatctggatagcatgaattttcgaattaacttggcacaggcccagcattttttgacgctgcaaggccaagaaaagccattgcagttcgatgcaacgcagaacttgattcagcaactggcgacgcaggctaaggcgaatggtcaaatggtcatggtcgtggtggccgatgatgatgcctatcttgaagggcaggtaacagctgtggctgaggatcgctttagtatggcgatcttcaacaaattcaactacaccgatgtgcgcgccttgcagcttgatttctcggatattttagtcatggaattccatggccttgatctcaaactggaaacggaactggtccggcaacgtgatcatctaaagcacgtggccaccaagctgtaccaaaatgacggtcaactggctggcgtgtttcagaatgccttggcgaacaaccgcttgatttcagtcgtacccaagggaccggaagatcagttctttgtgggtcgcgtcaaagcggtcaacgaccgggttgtggtgttgagtcttaaagacatggccggccaatttggtggctatattttactgacgttaccaagcatccaaaatgtagcgacggcctcggattatttgcaaacgatcagcttttacgaaaagtgggatcaaacccatcacttcagccagcagccagtgttgaatgctgatcgtgagttcgatccaaatgatgacttgattcagaccatcatctcagaggccgctgggtttgaacgggtggtgcgcattaaagtagccgacagcgatgaacattttctgggttatccggaaaatgtcggtgaaaccgattttgacttaaacctagtcggaccagatgatggcgaaacggcgcaaattcgctatggtcagattcgtgaaattgcctttggccacatctttgcgtatttgcaagaggcacaattgaaaaatgctggacgctgacagcgtgacgatcagagattgtcccaaagtgggcgatctttttttttcgttacgagccgcttatcttcggtttcagatgaaaaacattgcaaatttaaaaataaagttcgtgtttttagatggaaggcttaaattacatttttaaagttcggattttgcttgttttcataccgctatcctgttagactaccagatggcgggtaaaaatgcccgcactaagccgtgaggagcgatcagttaatgggaactgtagttattgtcggtacacaatggggcgacgaaggtaaagggaagattacggatttcctgagccaaggcgccaaggtggtcagccgttatcaaggcggtgacaatgcaggccatacgatccatgcaaatggcgaggtttataagctgcgcctcgtaccatcaggggtactctacccgcatcagttatcggtgatcggtaatggtgttgttgtgaatcctaagagcttggtcggtgaattggcccggctcgcagaacaaggcgtgactggcgaaaatctgcggatttcagaccgtgctcacgtgattttgccttatcatattaaattagataaattgcaggaagcagccaagggcgccgacaagattgggacgaccaatcgcggcatcggcccggcctatatggacaaggctgctcgagttggcattcggatggctgacttgctcgacaaagaaatctttgaagaacgcctcaaagctaatttgaaagctaagaatgaagaattcgtcaaagtttatgatagtacgccgatgaattttgatgatatctttgaagaatattatcaatatggccaacaattgaaacagtatgtttgcgacacctcaattgtgttgaacgatgcgattgacaaaagtgaacacgttttgtttgaaggcgcgcaagggattatgctggatattgaccaagggacctatccgttcgtaacgtcatcgaaccctgctggcggtgtgacggttggtgccggcgttggtgcctccaagattgatcgggttgtgggggttgcgaaagcttacacctcccgcgttggcgacggtccgttcccaactgaattgctcgataaaaccggagatttcattcgcaatgctggccacgaattcggtactgtaaccggccgacctcggcggattggctggttcgatgctgtcgttgttcgtcattctcgccgtgttgccgggattacggatctgtgcctcaactcaattgatgtgctaaccggtttggacaaagtcaaaatctgtgttgcctacgaacgcgatggcgaacgggttgaaaactacccagcttcgctcaagttcctcagtgaatgcaagccagtgtatgaagaactgccaggttggcaagaagatattaccaaagccaaaactttggatgatcttccggaaaatgcgcggcgttacgttgaacgcatcacagaattacttggtgttgacctgctgacattctcagttggccctgaccgtgaccaaaccaatgtccttgagaatgtttgggataaggtatcgcgctaggcccaccgcgatttgataattcaatagcgattttttaagagctgctaggtgaaaattcactggtggctctttttttgacaaattaggacatcattcatcggattctaaaagagcccagtgccaaggcggagcaagtgtcggccagaggaggctcgaagcgtcgtctccgctctaccagtcccatctggccggagattgtcgcaatcaaggtattttcatgattgacaccgttccttaaagtcggtatattgaagatgatatatgaacgtatgctcatatgaacattaaatgtaagggcgggatcaaagatgaaaaaaaacaaggccattattttttatatgcttggcgtcatcaccttcattggcggcttactcatcacccaaccgatagctcgcgcggcgttgttggtttttgccgcgattgttgcgggttatcaagtgattgcagaaggtatcatggcaacgattcaagcaactagaaaacggcaccgtttttcgccaaatattcatctcctcatggcactggctgcacttggcgccattgcgattggcagttttgaagaggccgcgatgctaattctgatttttgctggcgcgcactttttggaggagtacgttgaaaacaagagccgcaaagaaattacggcactactggctatggcgcctcaagaagcgcggcgctataccgacaccggtgcattagaagttgtaccagtgacagcattaaacatcggtgatcaactacagattctgaatggcgctcaggtaccgacggatggcgttattattgccggcactgctagtctcaatgaagctgcgatcagcggtgaaagcattccccgtgaaaagcaaaccggcgatgaggtttttggtgggaccatcaacggcaagtcaacctttgatatgcgggttaccaagtcaagtgatgaaacagtttttgctaagattgtccagatggtgcagtcagcccaagactccccgaccaaaacagccagcgtgattcaacgttttgagccgatttacgtgaaggcggtattggctgtattgccgattgttttacttgcgggaccatttttacttcattggtcatgggcaaccagcatctatcgcacgatcgtcttcttagtggctgtgtcgccatgtgccttggccgccagcgcggtgccggccacattgtcaggcatttcaagtctggcgcggcaaggggttctttttaaaggtggcagctatttagctaatctgacccagttaaaagccattgcgtttgataaaaccgggacgttgacggaaggcgtgccagtggtgacggacagcgaatttgtgtcggatgtggatgaagccgccttgactcagattattacggcaatggaaatgcaaagtaatcatccgttggcgaatgcgattgtgagccattattcaaaaagtgatgtacctatcacggatgtgcataacgaaattggcaaaggcttgaccgctgagtatcagggacacacttacaccattggtaagccgcagcgattcaagcaagttgattcggcatttcgcaagcgagccgcaacactcagtaagcaaggcaaaaccgttgttttcgttgcggtcgatcaaagggtcgttggcctgatcgccttgatggatcaagcaaaaagcagcgctaaatcggccattaattaccttaaacggcacgacattcaaccggtgatgatcacgggggatgcgcaacaaaccggtgaagccgtggccgccgacttgggcattgatcaagtggtcgctaatgtgatgcccgaacaaaaggttgccgtggtccgtgagctgcagaccaccatgcggcccgttgccatggtcggcgacggggtcaatgatgcaccagccctagccaatgcagaggttggcatcgcgatgggatcaggaactgatgttgccattgatgtcgccgatgtggttctagtcgaaaatgacctttcacgtctagcattggcccatcaagtttcaactaaaatgaatcgcattgtgatcgagaacctgttactctccatggctgttgttgtcatgctggttgtcctaaacgtcttgcaactcaccaacattgcttggggcgtcatgttccacgaaggcagcacgctgattgtcatcttaaatggcctacgcttgttaattccgcagagagcttaagggaaaactgccgacatccgccctcagtgaaaagtgcctttcgataccaaagtctgttaaaatgggccataagtatcttaaggagcgcagtgctatgacaactaatgatgttcgtaatgcggacatgaatgagaacgcggtgcctagtgacgccgaattgcgggatgtgcttgatgtgtttaaaaccatgagtgacccgacccgcatgcggattattcttgctattgccaaggggccaattacagtcaccgatctggccgccatgctcgacctcggtcagtcagcggtttcccaccaactgcgcctgctcaaacaagcgcggttggttgtgggggatcgctccggcaaacagatttattatcatttggtggatgaccatgttttggaaatctacgcgttgacgaaggcacacattgaagaaaagcagcatggacaagaaaattagtcattgcttattttaaaagcacacaaaaaccaccagtccgaatttgaagcggatcggtggttttttggtaaacaaagcacgcattatcatgcaatccttaaccaacgaaagacagcaactttaaggaaatcaagcacgattgtggctgccagtgtcagtagcagaatggtgactaaaagcggtgagctgatggccggcatgagccagccagtcaaggctaacagcgcaaagatgacaattgtgaaaagattgacagctagcaaggtgcggcttggccaagatgtccaaaagtggctccgttcccggacgatcagcagccggaactgggagttgaagaccaaaccaattaaaacagcggtttgcaagactggcaagctgaggtggaacagatttagccctaaccaaacgatcacgaggtcgactaaggcaaaccacaagcccaaaacgccggaagccgcgattaacgggccgagtcgccattgattaggaccggcagttgactggacattatcggtagcgatggacatggtcgcaaagtcattggcgaacacgagcagcgacatccccagcagcgacactaggctgacttttaaccagaagaagccgagtgtaaacaagataatgatctcaatgactttggtgattttgttgatgacccaagtcagcatacgctggtaagtttggcgactggtcgtgatagcagcgatgatgtcatgcaagcccgggtgcgtcaaaatgatgctggctgaagccttggcaacatcactggcgctgctgacggcggtccctaactctgcctgtttcagcgcaggggcatcgtttaccccgtcaccggtcatgccaacgagatggccatcttcttgtaacaacttaacgatttgatacttgtcatctggaaaaacattggcaaacccgtcactttcatgaatcaattgaattttatcggctgcggtgccggttttcaaagctttggctggtagaattttggtgccgatgccaacttgttcggcaacatcacgggcaatcggtacactgtcaccggtgatcatcatcggcttgatacctaagttttttagccgtgcaagcatggatgctgaatccgctcgcggcggatcggcgattgccaaaacgccgactaacgccatttgcgaatcgacgacgcttgcgacagctagggaacgataaccttttttggcgttggcggttgctagttgttgaatagcagcgctggcaggcgcagtgtcagcaggatgctgcttggcgtataacgccagaatcgtcggaacagcacctttgatgacccgcatttgccggtgatcagaggtcgtgatgaccgcctcggtgcgcttggtggcaaaatcgaacggcgtgaactgctgccgtttagagaaatcgaggggatgcttgatttcggcggcatagttgagcaccgcctggtcaatcgcatccggatgttcttgatctgccgctaaccctgcagcatccaacagttgctcggcagtatagccggtgagcggttggcaagcaatgatcgacaatttgttttgggtgatggtgccggttttatcaaaacagaaaatatcgattgaagcagcgtcttccaagctcgtcaagcgactgacgatgatgccttttttggaaagtgccattgccccgacagcctgaacaatggttaggacagcaggcaaggcgactggcacggagccaatcaggaaaatgagcacgaaggacagaataaaaaccggactttcatgcaggtaaaggccgtaaatggcaacaatgaccgatgcggcaatgccaagataaagcatgtaacggacaatggcgagcatcagttcttcttgtttcgactttggcttggcggttttcaccaacgtcaccgtttgaccgaagtaagtcgttgtaccggtgtttaagacgacagcctgaacttcgccgcttttgacaatgctgccagagtaaagcaggttgccagcgctagcagtagctggcagcgattcgccggtcagggcggactgatcgacggtgacattgccagcgataatcgcaagatcagctgggacaatggcgccaattttcagttgcacgatatcgccaggcacaacttggctagcggcgagtgcttgccaagcctgatcgcggcgaacagtggccataatctccagcttcttttttaaaagggcaaccgctttttgcgaattgttcgactggacaaagccaatcaccgcattaatcgtcagcaatacgaagatgatgatgctttcagtgtcatggcctaaaatcaaggtcagtacaatcgccaattccaacaaccacggcattggaccccaatagcgctttaagaaatcaagcaagttattgcgcttttgctcaggaatcgcattcggaccatactgagctagtcgctttttagcttcattactcgtgagaccatccgttgtcgtgttgagttgctttaacactgctgcctgacttttatcttgataactgcgagtatctgcaagcattcaatcatcccatcctgaatcaaaacattaacgacaaaattcttagctggtgcgaaacagttcatggacctcgtcggcatgactgaccaacttatcagctgcttcatcacacgcttgtgactcaagtgtaacgcgtggtgagcaatataaaaaatacatattcgaggtactatccatacaatttgtgtatagtggagttgaaggattgcgaagctgacgattaaaaatgaagggatcaatcgcgatgaatctcaagcaaattacctattttttagcggtagcagaggctggccagatgactgcggcggcgaaacaattgcacatggcgcagccgccgttgagttatcaattgaaagcacttgaagatgaactgggtgtccgcctgtttgaacgtgggtcgcgcggtgtccgactcactggtagcggccaacagtttatgacatacgcacaacagatcgttgagacggttgcggcagctgagaacgcagcgcggcgtagcggtgaaggtgagattggcacactggcgctgggactgacttcttcggccggtgatgtcttgccgaggcaaaaattgcaggcctttaatcgccgctatccgcaggtcgagtttgcgctttatgaggacaacacttatggcatcctcgacaagttacgccgcaacattctggatttggccatcgtccgaacgccatttaatgatgacggtctagcttcatgtcgcctaagcagtgaccacatgatcgccgttgctgccgcgtcgcagcccttgccagccacgctaaccattcccgacctcaagcagcagccgctgattgtgtatcgccggtttagttcgctattcaaaaccacgtttgccgagtatggcatcacaccgacaattgcggtgttgtgtgatgacgcgcgcacggcgttgcattgggcccagatggggatgggggtggcgttggtaccggcgaccatggccgctttggcgagtcagcaaagtcaccttgccatgattgattatgagccgtggataacgcacatgacgctcgtttggcagcctgaggcgttgcacaatccattggtggcaagatttgtggggcaactttcgggtggggaatcggagaaatattcaaaataaggttcgattagttttgtagaaagagtcctgagccgtgccaaactccgcaatctccggccagctggggtggcgacgcgaagctagagcggagacggcgcttcgagcccgcaaagtccgcggtctcgaagtcgcctaacaacatcagcgacaaatcccggtcgctgtgttgtttgcacggctgagccccatctggcctacgattgctccgccttggcactgggacctttaaatctcaatgaattatacatagaagggccaacaattctggggcaaaaattgttggtctttttcaatggatgtgaatgatgtctcaacatctttgcatcttttgccgagaataaatcatgagtatcccaatggttgatttaacgatggctaagttaacaaccgctcgatatacttacccatattgagccgctacaatgataagcgaaaagagggaacaagatggaaattaatgtcggtgctgtgatcagtgctcatcgcaagcaaaaaggcatcacccagcaagctttggcagattttgtcggtgtttccaaagcctcggtttcaaaatgggagacagggcaaagctatccggatattacgttgttgccgattctggccgcttattttgacgttagcatcgacaagttgatggcctatgatgcgcaactgagcagcacggaaattcgtcgcatctatacgtcaatgaagcaggcctttgaaactcaaccgggagacgcggtactgaaatcaattcgcaacttgattcggcggtattacgcctgctatccatttttgctgcaaatggggctgctgattttgaatcattacgatcttttaccgggaacatcacaaaccgcgaaagttaccgaatatgtgaatgaagcccgcctattgtttgtccgtgtgcggcaaaatagccaaaaggcgcagttaacggcaaaggcggtcgaactggaaggctatagtctgctgttgctccaacgacccgatgatgtgttagcgttgctgggcgaatatgtgccagaacaattgcctgcagacagtttaatcgccggtgcttttcagcaaaaaggcgacttgcagcgtgccattgcgaccagtcaaagcggtttgatgcaggatttgagcatcatcatgagtcaactgaccaattacatgaccttgctaaaggatgatcctaaccgattggcttcgacgtatcaacgtgggcaagcgattgccaaggcttttgatctagcaacactcaatccggcagtctggctcaatttccaactagctgccttgaatggctttgcgcaacaggataaaacggatgaagccgtggcccttttgcaggagttcacgcatgttttgacggcaaccaaaatgccattgacgctgcatggcgatgcttactttgatgccattgagccatggctagaacaactggacctaggtagccaatcaccgcgggttagcggtcaagccaaacaggttctggctgatttcgtcttgcaaaacccggcattggctaagatcagaacactgccagcagtgcaaccgttgttggctgagttaaagcaagtgagcgggcatcgctagaactcgtatatacgggcattcagaatctcaataatttaaatcaaagcaaatcttggaggaaagaaaatgaataccaattggcaactctttgcagactactggccatttttagtgccactgatcattttagaatttggcttgatgatcgccgcagtgattcatatcctgcgccatcagcattatcggttcggcaatcgcctattgtggctgttgctcgtgattttcattcagatcattggtccgattgtgtactttgtctttggacgggaggatgaaaattgaacatcctaactttgcaacatgtcagcaagcattttggtagcaagcaagtgctgcaagatctgaatctgactgtgccggctgggtcgatttatggctttgttggcgaaaatggtgccgggaaaaccacgactatgaaattgattctaggcttggatcaagccagcgccggagccattgaagtcgctggtcagcctgtgcatttcggtgaaacggagacgaatcggcagacagggtatctgcctgatgtgccggctttttatgggtacatgacggcaccagaatacttgaaattatgcggtcagctgacaggtttgcgcggcgctgaattgcagtcgcgggtggctgccatgttgatccaagtcggcttggcagatgccaagcaccgtatcagtggcttttcgcgggggatgcgccagcgcttggggattgcgcaggccttactcaacaccccgaaactcttgatttgtgatgaaccgaccagcgcgcttgatccacagggtcgcacggattttttacagttattggctagtctgcgtggtcagactacgattctgttttcaacgcatattctgagtgatgtggagcggatttgcgaccatgtcgggattctacatcatggccgtctacaactgagtgcgccattggacgatctgaagcaacagtatgctaaaaaccagattgccttgtcgtttgcgacaactgcccaagcgcaacaagccgcgcatttgttggcaaccttgcagcagcagggccagctgacgcaccttgagcaacaaaaaaacagtcttcaagcagcatacaccggtacctatgctgccgctgctgatcgcgtcctcaccatgttgcttgaagccaaactcattccgatcacgcttgcccagcaagaagccaatttggaacagattttcatggaggtgacgcgatgaacgcagccattattttcaccaaaaaagaactacttgaaagctggcggactcaccgcttgttgattttgacggttgttttcctcattttcggcattttgagtccgctgatcgccaaactcatgccggaactgttaaagggtggtcttggcggcattaaggtggcggtccctaagccgacttcgctggatgcatggacccaatattacaagaacatcacccagatgggcatttacgtgttcgccctcatgcttggcggttgtgtcagtcaggagattcaacaaggcacactcgttaacttggtcaccaaaggcttgccgcgctggacggtcattgttggcaaagcgattgtcgggatgttgctctggatctggatcaccagcctcgcctttttggtaacgtgggcttacaccgcgtactactttcctgatacgcgcagcccgcaagtggtactcgcgttcttaccattattagtctttggcttattcttcctcagcctgatcgtgtttggctccacactagcaacgaataattatggcggtttgctgctgacgattgtggtgatggcactgttgtatttggcacaaatggtcaaaagttggcaacatgctaatccggttgccctcattggcgacaatatgaaaatccttgtcaacagtgatgcgctaacgaaattgatgccggccatggtcattgctgtcgttgccgccgttgttttatttttcgcggcgatcaagctgctggatcgaaaaaagctttaaaaaattagccgaatttttgttgattaaactcaaacttcaacaaaaatatcggttatttttgggctatgatcaaacgatttttgaaaaagcagaagtcgtgttcacatgcgcaaacgttataacactcgggcttaccgtcgttatcgtcaagatgaatcgtgaacaaccaaataatgcaaaacacactatatagtgtatgcagtcgataattaaccacaaaatttagtggataacccgttacttttcctgctgagtcttgtatactagatacattgttacaagcacttcaagttaacgtaatgggggattagccatgatcgaattttatacacaaatcaagaaacgagacgggcgcattgttgattttgatgcatccaagatcagcactgcaatcacgaaggcggcagaaagtgtggcaaaactggcaccgagtgacgtgctgacgatcgatcacttgacggatacggtcacggctaagattcgcgatcgctaccacgatgatgtggaaatcgcggagatccaaacagtggttgagcagaccttgatcgctgcagaaaagtataactgggctgaagcgtatactgagtatcgcttgaagcgtgatttagcccgcaaacagaagcaagatgttaattataacgtctcgcgcttagtgaatcgcgacgaaagcgttgttaacgaaaatgccaataaggacagccgggtcttttcaacccagcgggatctaactgcaggggcagtggccaaggcaatcggcctgaaaatgctgccgcctgctgttgccaacgcgcatttacgtggcgatattcattggcatgatcttgactacaccccgtttatggccgaaaccaactgttgtctgattgattttgactacatgttgaaccatggcttcagcattggcaatgccgaagttgaaccggcccattcgattcaagttgctgtgacgcaaatgacccagatcatcgctaatgtggcctccagtcaatatggcggctgttccagcgatcgaacagatcaggtcttggcgccattcgccgagaaaaactatcaaaaacatttgcgtgaattcggcagcgtgattgatgatccggctaagctggaagcactggctgtgaagcagactaagaaggatatttatgatgccttgcaaactttggaatatcaggtgaacaccctttattccacccaaggccagacgccatttgtcacagtcggcttcggtttggggaccagttggattgaacgcgagatccaaaaagacatcctgaaaatccgaattctaggtctgggtaaagaacggcggacagccatcttcccgaaattggtctttactttgaaacgcggtttgaacctgaagccagaagatccaaactatgacatcaaacaattggcgatcgaatgtgccaccaaacggatgtatcctgatgtcgtttcctatgacaccatcaagcgattgaccggttccttcaaagcaccaatgggctgccgtagcttcctgcagggttggactgatccaaagacaggcaaagaagtgaacgctgggcggatgaatcttggtgttatcacggtcaacttgccgcggattgcaatggaagccaatggcgacaaggcgaaattctggaagatttttgaagaacggatgcgcatctgtaaggaaggcctgctctataaggttgaacgcaccaaacaagcaacgccagaaagcgcaccgatcctctacaagtatggggcttttggtcacaagctggctgacaccgacagcattgacgatcttttcaaaaatgggcgggcaactgtttcactaggttatattggtttatatgaagtcggtactgttttctacggctctgcatgggaaaagaatcccgatgccaaggcattctcagtttcaatcgtgaaggctttggacgatcactgcaaggcttgggaaaaacaatatggctaccacttctcggtttatggcacgccaagcgaatcgctaactgacaccttctgccgagcagatacgaagaaattcggtatcgtgaaggacattacggacaaggaatactataccaacagtttccactacgatgtgcgcaaatcaccgaccccatttgagaaacttgattttgaaaaggattatccgcaatacagtgccggtggcttcatccattattgtgaatacccgaacctgaagcagaacccaaaggcactggaagccgtttgggactatgcgtatgacaagatcggctatctcggcaccaacacgccaatcgatcaatgcttcaagtgcgggttcaaaggtgagttcaccgcaacggccaaaggctatcaatgcccagaatgcggtaaccatgatccagctacttgtgatgtcgttaagcgcctttgtggctacctcggcaacccgaacaagcggccaatggttcacggccgtcaggaagaaattattcaccggaagaaacatatcacgtttagcctgaatcaagtggctaatcggcgagacaagtaagccttagcaaatgctcaggttgggatagtcgcgtaacgaaaaaaatcgtccttcgtgggcgatttttttcgtggttttgtaccatgaaccttcctcgaatattagactttaacctatcgtattttgagctagacggtttttattctgttagggcgcgtgtacaattcaaatcaaaagttgtgtctaaatgaagcatgttcctgtggtgacagagtggaggtgcgccatggcagccgagatttttaccgccaaacaatggcaaacagcagagcagtggaataatggatggctttttgtgatggttgttgtgattttgattgtgatcattcatttgcagattgtcggattttatattcacgagcactggaaatggtggcttatcgtgccatttgctttggtgtgtattggactggccgggtttagctgggcgcggacggataatgccgccaatgcccagttcaatcaatggacaacgaaaattaccccacagattcggactaagaagccagctttatttaagtacgtacctgttccgatagatgaaattagaacgtatgagggattgaacgattatccaaccttaacaaccttaccaatgtatacacggcatcaaatcaccgcaccagtcacgtatttgggccgagatgcgcatgaggcgtattttaagtttcgtggattagtgtatcgttatgctggcccgactcatatcggtcaagtggctgccttagttggataccggttccatctcaaagatcgcggctatgcgcaactgggtttcattgaccccgtcaaaacatttacagcaacactcgtcatccctagagcacaagcgagccagcagtatacgccaacaaacgaagtggtcgtcacgcttgatcaaatggggggcgaatggacaacggaaaaggtctatcatggatgatctcttgcgaggatttagcgagcatgttgatgacgtggccatactggtttagtcatgaggatcgtaacgaggccactgagcgttatcaacagtacttgaagatcaacaccttgaaccgcgataaggacgatgcctatcaataaaaagatcaaaccgagcacagaaaagccgccagcaatcagacttcgactcaaaaccgaccagtcagcaaaaatgtccaccgattttggactgagcatataactaaaaagaaacagaaccgccacgtaagaccaccaaatcagctgtgcaagccattgtggaaagaatccgaataaggttgtggctgccatccctgacatcatggcaacagcagtcgtcatgaccgccatgatcatttgatggcgacttattttgctatcatggatcagtttttcatttagttttggatcgtcaagaatcaacgtatcaagagagacctcaaagattctggcaatacgcgtcaccatttctagatccggcaaattgcggtcattttcccagttggagacagtatggcgcgaaacatgaagctgttccgctaagttaacctgcgtcatctggtgtgccatgcggatctgatgaagctgctttgaaaaattcatgctactcacctcgcttgggcttattgtggcaaagatggatggcggtggcaaggtagcggggcggataaagaggcgcgttattcgagactgggtcattacccgggaaatagtgctggaagaagtcgggcaaacgaacccacattcgttcttttagcttccggtataaaacattggtgtcctatggttttaagaattgcaacttttacgtaagggtgtaccctattgtcgttgatataattgatgaatatcattaattacataataagtgtttcactggttgtttaaaaaagactttgaatttagttagatgaataaggagacggtcaaatgacacttgatatgaatgttatggctttctggcaaaataagttaaaggctatcggtccgcggctaacagctactgacagtcacgccaaatttattgagttattgcaagacgaaattaagaatcttggttttaacactatcgaatttccttttaaaattaatagatgtcttcaaagtagctgttctcttgagaatgattcaacaaaagaaaagataccaaatttaggaccagttccatattctggaatcaccaaagaaatgggtgtgaaaggagaaattagattctttcaatcaaaacacgatgtgaagatgaagggtaaagtggtcgttattaaagtgaaaaactttacgatccctaagcttttattaatgcatcaggttgccaagtaccctcggcatactcacattggatttagcataagacacccattagttgcagccacattgaccttaggtaaaattcaagccgccaaagataatggtgcagtcggcgttattctggtttgggaacacatcagtgaggatctcgctaaccgcgaagttctaccttttactaatagttatctggggattccttctgtttgggtatatcaaacccagctggaagccttgaagcgatgtcgtgatagaaaggaaccagtaagactaacactaacgggacaatatgagacaaatgtaacaacgaaatcatttgctgttcttgttccgggggaaaatcgggacaaacaaatccttataaatacacatacggatgggccaaacgatatagaagaaaatggggcaattgcattgctcactgtcttacatgccattaaacatgacaaccttaaatttaaaaatacacttgtatttggatttgtgagtggtcattttcaaattccacaaagcggaattgaaggaaggcaagccacttcgcgatttctgcgtgatttaagcatgtatgaaactagtcagcatcttgaaatgaagaaggctttaggcctaaccgttgaacacttagggggccttgattatgttgatagccaaaaggaaaacaagcttattgcgactgaattatatgatcctttgtatgtatatgcttcgactaaagaaaacagggatttggttttgaagagtttaagtggtaccaatgttagtggaagatatcaaatcctgaagccacgaaaaaatgcctattttggagagggccaacccttgtaccaagacggatggccaacaatttcattcattggcatgccgcttgcactttgccagatggcatctccaataactgaaccagatattcagagtatgtttgaccaaacgaagttgatttttcaaatactagtcgcaagtgatcatcagttttaaatcaattgcgcttatattttagaatgataacttaagctatcgaaccaatgactgactattgatcctgttgatagctgttgttagtatcgcacccggatttttaaagttaggaatacgagaccctgcttttaatctttgttaggaaagggaatcatattaatgaaaatagcagcattatatgatattcacggaaattatcctgctttgaaagaggttttaaaacaggtaaagaaactgtctccagacttagttgttttgggaggtgatctgatcgcgggacctatgcctttggaaacgctgtcgttattaaagcacgtttccaccacattcaaaactgtgggaattatgggaaacaacgatcaagatatcgttgatatttatgcaaaaaaaagagttggactatctagaaaggcaactgagcaattgacttggatagcaaatcaattgagctataagcaagtgtctttcctaagaaacttacttcccagtattagtattggaaattatttcttttgtcatgctgtgaaaaatgataacactactgttttttctccacgacaaaataaagcctacatagaggctttatttaaaggagttcaagaatcgtatattatttgtggacatactcatatacagtttgaattgtccttgcctaataaaaagattatcaacgcaggcagcataggcatgccattctcaaaccaatttggcgcgcaatggttgtggctggacgataacagagttgaatataaaagaaccattttcaatcaacaagctgcaatacaattgattagtcagactgaataccccttcaagaacgaatttattgcgaataatcttcgaagtacaatatccttgagtcaaggatatagcatcttaaatacactaattcgcgcccaaaatgcgcaacacgatttaagttaatacgtaaaaacatctggaattatttctcaattaagccgcttgatgttaaagatcagtgagtatgaattccctgttaaccgccttagtgaattcgaaacagattgcctaggcctctttaaagtcatgggtaacgactgaaaatactattgaggggtattgtctatgcaacttggcagctaagcggtgatttcaccacagaaataacgttcggtggcatcgagattggacacgtattaccaatagtgtccttggttaaacagatgttgtggatcatactttgttataagttttctcagtttgcgacctgtttcttccggccaaatacgttgactttcttctatcgatagatcacttgagtaggaactatagacacccgtccctaaatcttgtagtgggccaaaaacctccttagcatgaggctctgtgtccttttgcaaccacatagctaagaatactttcgcttttcgatcatgccatgcagtttcatcagcgttaatggtatttagcgggccgtcaattgctctcatttcgataccaatgattcctggagaaacaagtattttgctgataatatcgccaatattagcattcatggcatccagtaaaatattttttacgaaaacaggttgttgtccagaatgcgggatatgaggagccttgaccaattcagcatagctttttgtctctaattgatgtttattcacttcagaaaggcttagagctgatttaaacaaggctttcgcatcagaatttatagaacctgcccaaaaattactagcattaatgtgaacagtatttctattctcggcagtcaacatgagattgctgctcattttactagatgcttgagttatccaactttgccattgctgaatgaactttgtcaaattgctcgtttgggattcaatggtttgtacagtaaatggtagcgaaatatcggatttcttttcaaccaacttacttgctttaaaagtgaacgctgtaaccattcctaactgtgaatttccacctcgaataccccaaaaaagatcaggatacttttgatgatcagtcacacggatctcaccatcagcggttactagtctagcgctgacaatatgatcgattgtcaaccctagacgacgaacgagtaagccaatgccaccacctgtggcgagtccaccaacacctgtatcaccaaaatcaccacttgagatgattaaattaaacggacgtaaagcctcggcaacatctccccagactgcgcctgcttgaacctgaaccaatccctgttccgcgtcagtgacggtaacgctatttaactgtgaaatatctaaaatgataccgccattattcaccgaagccattgaaatgccatgaccgccgctacgaaatgaaaacggaatactgtggctaacattttctctaatttttttgacgtattgaatgctagcaatgacatcacgctctgtcgttgcccttaagattagctttggacgaccggtgacaaaatagtttgaacacataagttcatagtcatcagaagtgggatcgattgcgatcttctttagtgctactggtaacttaggccacgtggcgttaacatcgttattcatcaaattcctcctaaaatttttttcatggttggtaaaaattgctcttacagatgctaaaaaatgattcatcatcagcgacagtcgtctatgttagaaaacgcctttattaggctctgctgctaaacatcctcattctagtatactttttgacgagaagtgaaaggaagagacatgaagacttcaaaaacataaaaactcttaccctagagtgaacgtggacttcacaaaaaatcttgatgtttgtttatcagcagcatttgaagaccaacaccttgaaccgcgatgagaacgatgcttacagtagaaagatcaggctaagcacagacagatcgccaagtaaggatcaaagaaatttgttctggtatactaaccagaggggatagaatgccatgaaaattgtacttatcatttgtatcgtcatcgcgatagctgctgggtatgtagcgaataagaggcggcaaagacaatgataacagcttcaatttctttgcttgtcatacctcaagcttccgtgctatactccatgacggtgccaaaccacggtgagttcgtaacgatcggcgcgtaagcgttcagaaggtcgaagcggctcgccatttttttgtcttcatttggtacaaatgttggtggtgaaaggcggatctgacggacaagaacaaccttcttggctgctaagaaggttgtcagaagcatagataaatgtatcagggcaaacacaagcgcattaatcctgacgcttactatcctgggctttcattttctgcatctcccgcttttgcttacttaattttgattgccgtccgccttcccacaggctaatcaaagccaacaatccaatgatgggcatggcaatatctccaaaagagagttgaagcaaaccgtttgctaaaaagtagatgtcggccacaataaccgcgattggcagaatggcacctagcagtttattttcaatgtagccaaaaaaggtttgaagagaaatgacgatgacgatgatcagtgtttcaatcattggtagtctccttgtatttttgaatgatttcttgggccaaggctaaatcgagtttgtcgtcaatgaccatctgcatgatgctaacctgaaacttgtttttctgatccaattcggccgcttttagcttgcgaatgacgcgatccaaacgtagccggatggttgggtaagagaccgagtacttttcagaaagcttcttgagtgaaccagaagataaaacgaattgtctgacaaattcctgatcgtcttcatctagcaacaaaattggattcaatgtcacgaccaaccgccctccacctttaactttgttgatagaattttaacaaaatgaaagccgcgggttccaataaacagcttgggaacggactgttactcatataccacaacaaaaaaccacagcccatcttcacaatcggctgtggcgaaataaattagcattttgatataagcggtgttggtaagttgcgtttcaggagattggctctgtgtttaagttcttcgctgacgagcaagcggttagggcttcccaatcgactaatggttgttgtacaaccgcggctaggatcagaatgagcgaccatgtgaggatcagactcatggtgacatcaccggtgaaatgggcgaggatgcgcacgcgggtgtaggccatgacggcgccgtaagcgaaggtgagccagaagaccagccgctggcgttttggcttgtcacgatcgacgaaccatgtcaaagttagcaaggtcgcggcggtttgggtatgaccagatgggaagctcatgtgaccattggcgccgtttggctggaaccagcttgtgaagtgggtcggattgccgttcaattcataaggacggaagcgaccccagaaagttttcatggcattgacgatttggtcagatagcaggcagaccaaggtggcgacaacagccattttcaataagtaatgaagctgctcatcggttttgtgggcgagccagtactgactgccgatgaacacggcgaggtagaggatgaggaacaaaatgatactggtggcacccggcagtgttagcttgctgccgtcagagttagccatgcccattggcttgccagcgttgatatcattcagcgaggtgatcaccatggtcatggcatacttgaggtagccggcccaaagttcccaaccagcgtagatgacactaccgatcaccattaaggtgcgggtataccacgccagctgttgtgaacgaatggcataatgacaaacaatgttgcaactgagcatgatgatcaacggtgcggtccacagcccaacgtcttggaacaaagtggcgaatgggtcgttcatatcaccgatggtttgcgagatttgccagtcaaacccagcagcggcagctaacaataaaagcagtacaccagcaacgatcaagaaaacatgtttgcgaatcggagcattcaatttttgcgtttggtccatagcctttccctccttagacgcgttcgcagtcgcagaaacttccgtgtaaggaccttgaagcaaaaggaccaaaaaggcggtcctttcacttcaaggccactgacacttcagtttctcagcgctcctgctctcgctctttgaaaatggcacatcatttacagaaaaggtcgggatttacggtacctgtacgcaacatttaagtggtcgatacgaagtttacaacttatcagcaaaataaggttcatctaccgtaacttgacgctgatcgaaatcgaccgtcgtttgcaggccgtatggcaggacggttcgcggataggcgtggccaaaattcaggttgtacagaatcggcgtcttgtatggttgggtgacatcaagcagcacctgctggtaaacgtcaaagtaagtttcattttggggcttgccaacgagaatcgccttcacttgtgcaagaacgccatgttcatcaagatgttctaaataggtgcggtaagttacgggggttattttgtcttctgatgtttcaatgaaaaggatcttgttggtccagtcttgcgggaagagctggtactttttggccacttctggttcgtcctgatagcgaaccgggtagattaagtcgtggagactatcgagacagccaccaagtaaggtgccagtgacccggccttgaccccgcagcgcgaggtagccatgctgttctttgtgtgattttcgtggtacccctaactgactttctgaaaagtccgtgcgttcgtcgtaccaagtcgggctggaactaatcgccgttgtcgccggatttttgaaataatgctgaaaactggcggcggtgtacggcaacatgtgcgtgtctaattcagctagatcatttaaaaaattaggcccataaaagctagtcatgcctaattgataaaacatgagatggtcaatggtcgtgtcggaaaaaccagtgaacagtttgggatgatcagcgactgcttgcgtgaaagccggatcatctagcaggtaagggatgattcggtaagtatcatcgccgccgatggcacagatgatacctttgatgctcgggtcaaggaaagcggcttttaaatctgctgcgcgtgcttctggatgggctttgagataggcttggccgcgtaaggcgtttggcataaagcgcggttccagcttcatggctttcaatcgctcagtcccaagttgaagctgatgggctgcaaagctttcacctagtgttccggcgctgaggctgacaatggcaacttgatcatgtggctgtaatgcttgcggttttatcataaagatctccctgctttctcatacaatgcattaattatctattgaacatgcaggaaacgcaagcgggcaaagagatgacaccatcgtcgttctaaccgtaaaccggttgcttgtttttccggctggcaacctgttacgatcgaatagaagacctatcaggaagtgttggttaattaaactgtgcgatttttaacaagacacagtatcagggggaaagcgatatgtataccatccaagcgactgccacgattactgggcgtggcacagtgatcacgattgcgcctccggttgaacgcattcagccgggcgatccgatccgccttaatggcacgacaacaggtaaagtctgtgcgattgagaagcggcaacatccgcaccatactgacgaagtcccgtgtctcgggttgctcgtcacggcacctgtcaaagtcggggatacaattgaatttccgcagtcgccacggtggttgtgaactgtaggcgatacgcgctcccagttgcagaaatctgctcgtactcaaagaaaaagtcgctatctgaatcgtcaacggcatcacgttgatttcagatagcgactttttatggttactttgagcaaaatgaagatatattttggccgttgtggcttacttcgttaagagtccagcctcggtcatgccgtcagcgtagagcttgagcttgccgttgacaatatccatcaccaaatcgccgtagtcaacaccgtctgcttcggcttcttgcggcaacagtgacagtggtgtcatccccggcaggttgttggcttcaatgacccaaacacctttttcgttggcgaagaagtcgattcggccgtaattttgcaggcccagaacatccatcgtttggacggcaacatctttcatagcctgatggacatcttcatcgagatcctttggcggggtgatgaagtcggtgtagccggcttggaatttatgcttgaaatcataccaaccagaacgcaccttgatttcgatggccgagtaagcgtggccattgacaacgcctaacgagaattcgcggcctggggtgaactcttcaacaatggcactgttgtcgaagcggaaaacatcttcaaggccgctttcgagttcttcctgattatgaataatatgtgtcccaacgctggaaccaccggatgttggcttgacaacaactggaaagtcaaacggaaccgtttgttttggcccttgatcgcgcttgaattccttgaatcctgaagtctgaatgccatgatacaacatgacttccttactgaaaaccttgttcatggtgatgcctgaagccagcgggccagagccagtatacttgaccccgttgatgtcaaacacagcctgaaccttaccgttttcgccatcgccaccatgcaaagcgaggaaaacaatgtctgctgctttgcagatcgccataacattgggaccaaatagctgggtgctgccatctggccgtaacttattgatgtcttcatcagtcagaatcgcatctgaaatattcagatccttgctggtgttggcgtcatcaaaaacctgttcgaccgtcttcccttcgaggtcgtagccaagaaacaggtcaataaaggtggcctgctgccctttttgccgcaaggcgttcgtgatccggtagccgctagaaatggaaacattgcgctccgtgctccggccgcctgctaaaacgacaattttcatgtgatagtacctccgcgtattatccgagtttgatagaaacctcagtttagcacaatccgggctcatcggcgataaagatgctaaaaaatggtgtaatattaagaaggcttttaaaccttctgccacggttgtgaacgcgctttctctaaacagcgcagataaggagtcaaagaatgcaatacacacggttagcaatgcccaatcacgcctattttatcgtggccgaccaagggaaactggccttcgtcgggtcaccggatgcgccgcttagcgaggcggctgattatgtcagcagttcacttgaatttaatcaagaagagatgttgccgtttcaaaacgccattgatgattatcttactggcaaggcgcaaaccatcacagtaccggtgacttaccatgggacgccgctgcaagaagccgtctggcagtatctgcagacgattccttatggagagacccgaacgtacgcacaggtggcagccgcagtcggtcatccgcacgccttccaagcagtcggctctgcggtcggaaagaatcccgttatgatcgctgtgccttgtcatcgcgttctgcgcaaagatggtggtttgggtggctttcgtggcggtttgccaatgaagcgcgacttgttggcacttgaacaagggcagcggccaattttttaaagatgctttttcacagaggcatcttgtatactggtgagtggacaaattggaaaggaagtttaacacatgaagattattgcttacggtgcacgcgttgacgagattcaatatttcaagcaatgggccaaggatacaggcaacacacttgaataccatacagaatttctcgatgaaaacaccgttgaatgggctaaagggtttgatggcatcaattcattgcagacaacgccatatgcagccggcgtttttgaaaaaatgcatgcgtatggtatcaagttcctgacgattcggaatgtgggtacagataacattgatatgactgccatgaagcaatacggcattcgtttgagcaatgtaccggcttattcgccagcagcgattgctgaatttgctttgaccgatactttgtacttgctacgtaatatgggtaaagtacaggctcaactacaggcgggcgattatgaaaaagcgggcaccttcatcggtaaggaactcggtcagcaaaccgttggcgtgatgggcaccggtcatattgggcaggttgctatcaaactgttcaaagggtttggcgccaaagtgattgcttacgatccttatccaatgaagggcgatcacccagattttgactatgtcagccttgaagacctctttaagcaaagtgatatcattgatcttcatgttcctgggattgaacaaaatacccacattatcaatgaagcggcatttaatttgatgaaaccgggtgcgattgtgatcaacacggctcggccaaatctgattgacacgcaagccatgctcagcaatcttaagtctggcaagttggccggtgtcgggattgacacctatgaatacgaaaccgaggacttgttgaatctcgccaagcacggtagcttcaaggatccgttgtgggatgagctgttggggatgccaaatgttgtcctcagcccgcacattgcctactacaccgagacggctgtgcataatatggtttacttctcactacaacatctcgttgatttcttgaccaaaggcgaaaccagcacggaagttactggtccagcaaagtagtcaactgaatagcaaaacgtgccctgcctattgacgaatacgttaatggcagagcacgttttttaatattgggattgattgcttaaaaaatcgaattgccacgaattgccatgatataaacgaacaaggcagcgccattgacgaacaaggagacggcaatgattgaaaaacgaatggtgtacggtctggcgcctatgtcaggatcataaaagcgtgaacggcgtttgccacggtaagagaagaaaaagcctaccagaataacgacaatgatgctctcaacaatcgtgagcaaccaaaaaaccggttgcgttgtattggcagtgaccagaaagtacccgccaagagcgataagatcgagcaggatcgaaatgagaaccatcgtaaattcctcctttgaagtgagcgtgagccagcgcgggtggaatcgaagtgcaagtggccttgggcgtgatgaccgttctttggtcattgcgaccaaggtccttacacgcaggtttcagcgctggcgagcgcgttatggcgtgggactaagacttgggatgtagaggctgagccgtcagttttgtgagtacctgaatggtagtttgaacatcttgtggatcaagggtatgaagtacagaggcgagttgagcatttgtgtgatgatgcatttgctgatgtaaggcagcgacttgttgaccaagcggagttagtgcaacaatgtaggccttgcgattgtcgggcaaggataattttgtcagcaagtttaattgaacaaggcgagcaacatagcgtgagactaggccttgtgagaacggaacagcagcggttaaatcctgattgcgcagttgtttgcgactgctttgatccagcgttgtgagtaacgtcaattgggcatgattaaaccgaactgtttgcatttgccggcgagtttcagagggtaaagttgccagccaacgatcaaaaagcacttgccacgcttgctcatcggcagctcgagtatgggcattgagcaagcgaatggcttgttgtaattgggtgaaatcagaagccataggtatctcctttttaaattacaagtaatatattttgacaacagaagatcttggagttacactctagaatatattacatgtaattaaacttcaagaaattaggtggtcctttgaaagcagcgattgtaactcatttagatcaagcacctatttatggcgattttccagccccaaagccagcacctgaggaagcattgatctcggttttggccagcagtgtcaatcaacgcgttcgctcgcaggcggatgggtcccattataccaaaacgcctgagctcccatttgttcccggacttgatggcgttggtcgcaccagcgatgggcaactggtttattttctaacacgcgatccaaaattcggtgctttagctgagcaaacagtgacgcagcaacagctaatgtttccactgccggaagatgctgatcctgcgcaaattgccgcgagtgtgaatccggcaatggcaggctggatggccttgcacatcaaagcggggcaggttgttggtaagcgggttcttgttcttggtgcaacgggggcggctggcaccgccgctgttcaaattgctaaaacaatgggtgcttcacatgtggcagcggttggtcgaaatcctgataaggtggcggccttaagtgatcttggtgctgatacaacagtgcaacttgatgacaatattgccttggcggctttaccgccagccgacattgtgcttgattttctatggggcgcacccagcgcaactgtgatgatgacactgctaaaagcgcggcgtgatcatgctgtcaagttgatttggattgagattggtggtgccgctgggccaacattgtccttgccggccgctgctttgcgcagtaccggattaacattggttggcagtggacaaggcagtctgacattggctgactatcaacgggaattgcccgctttgttcacggccttagccgctggaaaatttgtgacaccaacaacggttctatcactcagtcaggtgcatgatcactggcaagatcgcggtgcggctcgaatcgtgttccaacccatagcccatgcaaaaggcgttctcgtttgtgagaacgccttttgtcatgatcgtggttttcatgattccgaaaaacgcattaagtgaagcgttcaggatgcacattgcacagtgacttaacgaatcagttaaaagaataaggtcaggcaggcaagggcaccgggaattgcttgcacaaagtagatttttttgctaacggtcgcgccgccgtatagacccacgacggtgacaaagccggttaacagccgcaaggtaatcaattgatcaatgccgtgcagcagtattaggctgagcaacatgacaacagcgagagcaccgttatagatgccttgatttttcaatgcaatttgagcattgggttgtttaacaaaatcaagcggcatgctgaagttttcggcctgactttctggtttgccgaacatttccaaggccatgatcgtcaaatgcaataaaccgagcaagccgacaagtaaggtgctgataagtgacacgatgtcacctccgtttctttctaaacgagattggttcccaatttttctaaacttgcctgagagcgctctatgtttataggaacggtcggaattgggctaaggcaaatccggcgactgtcaccaatactaacgctgcaagggtgctccacacaatcggtttgctcaggcgatggtcctttttgccagcgaaggcgatctcgattaagccgatgaggccaattgcgattagaattttaactaccgtcaacaacggattgcgcgcaaaagcaaagcgcatcaagacaatgccgctcacaatggaaacaagataacaaacgcgggtgatcatcgtccataacataaactggcgagtcttgctaaaaagagcgatccccgctgcaatgattagaactgaccatgaaacaagatgcatccagagccacataaaaatgaccttctttctgtaaacgaatgttgtagtctcatcataccgctttccgaaaagcctgacgagcgtgtttaaaattagggaaaacacgaacattaatcataaaaaaaagaaaaataaacgtattttctattgcaactgccgtcagtctcgggtacacttttcatattcacagtttaggggagcgtgtcatggaaaacttttttcatttgaaagacaataagaccacgccaatgaccgaggtcatggcaggtctaaccacattttttgcaatgtcatatattttattcgttaatccccaagtcctatcacagacggggatgccggcacaggccgttttcttggcaacgatcattgccagtgcggttggaacgctggtcatgggtcttttcgctaatgtgccgtacgcgttggcaccaggcatgggactcaatgctttcttcacttatacggttgttttcgcgctgggattcagttggcaagaagccttggcgctggtcttcatttgtggcgtgatcaacattttaatcactgtcaccaaaattcggaaattaatcattgtcgcgattccagaaaccattcagcatgcgattggcggtgggatcggggtcttcgtggcttacattgggatcaagaacgccggcttcttacaatttacttctgaagcttccagcattaacaccatcaacggccaaccgttgaaggcgggcgcactgacgctcaaacatggggttgaatcggttgtttccaacggtggcattgtgccggcactggttaacttcacccaagcaggcgctttgctggccctgattggtttgatcatcatggttattctgaacgtcaaaaaagttcccggcgcaattctgatcgggattctgctgacgaccatcattgggattccaatgggcgtgaccaacttgcatctgagcgctgcaaattcctttagcagcacttttgcatcattgcagacaacctttggcgccgctttttccgctaaggggatgggatcgttatttaccagcccagacaaaattgccctgtcaatcatgaccatttttgctttcagtttctccgacattttcgacacattgggaaccttcatcggcacaggccggcgcaccgggattttctcggatgctgacgaacgtgctctggaacaaggttcaggcttctcgtctaaaatggatcgcgccctgtttgcagattcaattgcgacaggtgttggctccatcttcggtaccagtaacgtcacgacctatgttgaaagtgctgccggcatcggtgctggcggccgaactgggctgacttcggttgtcgttgccggcatgttcctgctcagctcagtctttgcgccattcatcgccattgtaccgacccaagctttggcacctgccttgatcttggtcgggatcatgatgatgagcaccttcaaggaaattgaatgggaagatctttcccaagccgttccggccttcatggcatccatcgtcatgggctttgtctacaacatctcatacgggatcgcggcaggcttcattttctattgcctgatcaagctgatcaccggcaaggttaaggaaatccacccagttttggcaattgtcacaatcgggttcattctgaacttcgtgattctggcatcgctgtaatacacaactaacggctgtcttttaaaagaagctgaaacagacactgccactgcgctgtaaccaaacgcgcagggcggcaatctgtttcagcttctttttgatgggcgactcgtggtatcctcaagctgaggtgagacaagatgacactaaaaacaatttttcatttagatacaactgaacgctggccacacttggcgtctaatctcgacaactatctggcggcggagccagatgcagacatcgaagtgctggtgaatggtgatggcatcaccgtcttttttgaccaaaaggtagccgccttcatcgctgcgcatcctcaggttcacttttttgcctgccacaattccctacagcaacgtcacttggacgaaacaaaattaccggctggcgtgccagtggtgccggtcggggttgttaaactggcacaagctgaggcggctgggtatgggtatattaaaccttaaaaatagacctgctcattttgagcctgccttattatattgacgaggtcatgtcatagaggagaaggtgttaattatgccttccccgccgtctgcggttccgtgttaaatggcaccaaattccgttcgattgcttcgcgctgatcttccaagaatggtggtaattcgaggtgaacaccggcttcttcgtaggtttcatctagtaggaagcctggaccatctgtcgcaatttcaaacagaatgtctgaaattggtcggaagtattcggaggcgaagtagaaacgatcaacgaagcctgacgagttcaaaccagcagcaccgattttttcgatccaatgctggaggctgtcgcgatcatcggtgcggaaagcaaggtgatgaacgccgccgaagccttgataagcggctggaatcaaccgttgatagtcgataatgacttgcgcaccgtggccgccgtcattgagttcaagcaaggtatattgaccgtctttggcgatttgcttgaagccaagcagatcggtcatgacaccgaccagttcgtcgtagtggtcggtggtgatgtactctgggccaaggccgccgatcgcaaattgcgggtcaacggttgaatggcgccaaggcgtgcctgctggaacaccatggttatgctcgtcactgatgagttgatactgttgaccgtcaaaatcatggaagcggaggatcttcgcgccgaataagtcgtcaatcgcatcgtgatgcacccgatacgtatcaaagcgatcggtccaataggtcagcgcggcatcagacggaacgcggaagctggtacgcgcgatctcattattaccatgctgagctttttgaatccccggaaagtcgaaaaaggtgatgtctgtcccagcagtgcccatatcatcggtgaaatacaggtgataggttcgcacatcgtcctgattgacagtcttcttgataagatgcaggcccaaaataccgctcataaaatgaaaaatccttggtgaacttgaggtgatggcggtcaagtgatgcaatccagtgagttgattagccatggtcagtgctccttttacttacatttagtaagtaaaaggtaccacgtctcttgtgaaaagacaagggttgcgttttcgttaaagtgcttaaggtcttttcaaaattcttggctctgaggctaatggtcctggcaggcgtggtatgctctcgacattgaagacttgtcagaccaaaaggagcgcgtgccagcgatgtttaatttcttggataatcctgcagagtataaacgattgatgaagatggagattttggtagccgtcatggcaattgtggctagtgtggtcatgtttcgattgagtgtcatgactggtgctttgttcgcggccattgccggggctttcttcatcatggatgcgattgttgaaggcttgcgactacttggtgcttcacatggttttagccgcttgatgggtaccttaattgcgattccggcgttggcggggtatttgctcgtgatgatgaccttgtttccggcgccaatggtctaacgataggcgcgtgccaagactgggtgtcagtcggcagccaagtatgttgagcaaatgagcattaaaacaacgaaaaagatctttgtacggacgcgtgtggcgttctgtacaaagatcttttttgagcgcgagcaggcgtgtttggaagtcggaacataggggacttgaagccaaatgacccaggcttggtcaattagcttcaaggacctcacctgtaggtttctgcgattgcgagcgcgttatggtgcgctgattaaaaatgaaaggcgtcattatcggcaacagcattagccgtcaattcaaagcgcgccagtggaactttggtgccagccggtaaagtgcggtcatggtgataatcaccgacctttgtgaagacgttggcagctaacaatttcgctgctcgttcgttggtggctggcaagatgacataaacccgtttgagacctaattcaaagaaggcaaagccaagcatccgtttgaggacttcactcataacgccttcaccttgacgctcggccaaggtttcgaagcgtacttgggcaacggttttcttttcactgaagttccaaatacagaaactgccaagaaaatcaccattggcacgatccttgatcccgtataacaaggcgttgttactcatgacgaggcgcatggaacgattgatgtagcgggccgtgtcggtgattttttgatcgaattcacggcctgattctgcggcaatttgccgatcggcgcgcaactggaaaatatccttgattttaaatgtcgtcaaccagtccatggtgtaatgcacggacatgattggatggtacttctcaaaactttgcatgttatagcctccgtgatggtgatgacgttagcttaccatagattgcgcaacatgcgtgctttgagcctaatagcgaacaatccgttgacgctgcgattattaaaaaacgctgatttcatttttgagatatcagaccatctgtcaagacacgatgcccttagtggttattgatggtcatttgagaagtggccaaaaagtgattgtgtgaggatttacacaaatcattttttattttttcatgattcaaataaaaagaaaaaatgacagaatatagaactcgcttatataatcaataacattgagaagggggagtgatacgaatgaagcagcttttttttggcttttgtctgggttgatgttgttacagccgcttgtctcaagcgcgagcacgcaacttgctaaatcgctcatgccaagcgagtcttcaacctcagcgactgacagtttagtgtctggcgctgaaagtatccttgattcaagtaagacgtctcagcctagtaccagtcagcagaaaacgacacaggcgaccgcatcaagtgccaaagcatctgccagtgtcgaaaaaccgacgcaagccaaagaatcatcggcaagttcttcaaaagaagctgctgcatctgctagtgtcgcagtatcggcggccaaaccagaaccgccaactgcggccagatcaaaaagatcaattgaagatagtcggttgcggtctggtgcagcgccagtgtttgatcaagatcatccatgcccggtgaaaacaaccgccgagttaaaagaagcgattgagaaagggattccttatgtgcgattaacggccgacatcaatattggccgcgaagcgattcccgtgaaaaactcagtcacgatcgatggtgatcacaagtacacgtacatgtacaacagtggcgaaagctggcatcgcggcatctactttaacgccagtaacattagcatcacgtttaagaacttgaaaatcggtgatcgtaatgtcgctgaatcagccaataactactatgggatcgcaccagccgacaatcacactgaaaacagcaagatcatcgttgaaaatgttgattactattctgatcgcggcgcccaaccattccatatccgcaagccaagcaaccagatcgttttcaaaggtaagaatacattttatacgatgaaaaaagacgcgttagttcaggaatttgctgaagcgacgaattacctttttgaagaagattcggataccacgattgaaatggcggacaatccgttgctcggaacattctgggcatcagccggatcgctgaacttggaattgaaaaagcgcgctcgtctgaaagttgtgagcagtaatgccttggtttacaccgatgggctcgctcatcacaacaatcgcatcacaattggtgaagatgccgttctggatgcttacctgacggacaaaaatgacggtgctttcatgtatcaccatgacgatttagtggtagatgtccaaaagaatgggcagctgttgatccaaacaaccaaagccacgccatttacgaaagcatcaagcatcaatcttgggcccggcgccaaggcggacttaaaaaaccttcgtggtgatttcttccactcaggagatggcacgatcaagattgacaatgccgacgagttatcgttcgggtctggtgatcacggtactaaaagtcccactggtttaacggcaggaaagtccgcgaatctgatttttgccccgttcagtgccgagacaaaaggttatgacatttatgccgataatcagttgttagaaacccaagcagatgattccgattggcaactgaatggcaagaaagttgaacgtacgccaaccaagttagacaaatcggcggcgaatcgcattcaaaagagcacagccttgaggtttacccgcaatggctcaccatttaaagcaacggctccagatgtgaagccgccggatcaaccgaagccagatgagaaagacaaacagtcgggcgcattaaaactggtggaagtgcctgactttgattttggcaccttgctcattagcagtgagactcaggttgtgcgaccgcagattcgtgggaaattgttaattgaggacagtcgaaagattgccaaaaaacagtctcggctatcgatgaaagtgattcaaccattcaaaaatggtgagatcgatgtgactggcaacatgagttatatcagtcaaacagggcaggaacaggttctgtctgaccagagcatcttagttgaagaaacagctgatgtcgatcaacgcgatgttagcagtgagtggaatcaaacgattgacagcagtgcccgtgggtttaagttgacgattccagttgagaaacaaaaactgggcactttctcgggaaaagtagaatggtcgctacaagatgtgccggctaattaaggaggacagaatgaaatgaaaaaaatgattttactgactgtcctcttattgggcttcgcctgcaacccgttttcacaggttgatgcagccgaagcgggggatggctatacctcaggcgctgaagttggcttttacgaatcaccgtcatccgctagtactgacagtcaggctaaaaaagcagggacagggcaaactgatggcgcgaaagacaggtctgatgcgcaaacaacgaatgcggatcaattcggcttcatgccacggcttggtacaacgcaagcttggctttgcagcatggccggcttgttgacgatattcattatcacattgcttttgattctcaaacgaaatggaaaagacaaggaagaggaaaattaaaaaatgaaaaaaagttatctagtggcatcactggcagggttaaccctgattggtctcagcagcatgccagtctcaatggttggggcaacgactgaagttgtatcagacggtcaggtgatgtttaaaaccgatgtcacccggacaccagcaaagaatccgcttgatccaggcgacgccaagccaggtaagccgactaatccgaccaacccaactggcacggcaaccaatggtaccaccggaccactatccttggactatgcttccagttttacttttggcgaagcaatgattagcgcagatgatgctaagtactatgcgaagccgcaagttttctcacaggatgacggcaagaccgtggatcgtcctaactttgttcaggtgaccgacaagcgcgggacgtttgaaggttggacattgaaagtgaagcaagaaaaacaattttcagttaaagatgatgacactaaggaattaaccggtgctcagttgaagttcttgaatggaaatgtgacatcaacaattgatcagcagtatgcgccgactggtcaaaaggaaatcacgcttgtgcctggcagtgctgaggtcgcaccgcttgcggctgctaaagatcagggcatgggcacttggatttatcgattcggggatgaacagacgatggccaagtcaattgagttggcggtgcctggaacttcgccgaagatggccaaggaatatgtcaccgaattgacctggacgttagaatcaacgccaaccaacacaacaccgtcaccaaaaagctaaagatcaacgtggaacagtgattcgggggaacttagcaccaaagcagcaaaccgacaaagatcattagcttcgcatagcgtcatcactgacaacaaagattgctggcacctgacaaagatgcacgatgaaaactaaaaaatggagtgttatgatgaaaaaatttgttttattagcagccgctgcagccatgggtaccatggccgtcaatgccacgaccgtactcgctgcccaaactaatggtggtgtgtacagcacgaacggttcaatcgaatttaagccaacagaaaaagtgacaaaaccagtcgatccgcttgatccaactaaaacggccaccccaattgatgcggaggatccgaagaaggttgttcaaccaggaacacaaggcccattgtcgattgattttgcttccagcttcaattttggcaagcaagaaatcacttctgaaaccaagacttactttgcagcagcacaaaaatatcaagatgctgcaggtacggaaaaagtgggacccaactttgttcaggtcaccgataatcgcggcaccgaagccggttggaaattagttatgaagcaaaatgaccaactcacgtccgttagcgggaaagaattaactggtgcacaaattcggcttaagaatgggcatgtggtcaccgcctccaccgcagcacaccctgatggtacagctgagatggccttggtgccgggcgcagagcaaacggtgatgaacgctaaaactgggtcaggtactggcacgcacctattgaactggggcaaagatgccgatgatgcggcacgcagcgttgaattgaccgtcccaggcgccacgacgaaatacgctgaaaagtatgcgacaacattcacgtggactttaacggatacaccagataacaagtaagctcatgattctccgaaaatgttggacgcaattggtttccgttagcgcacatacattttctagcatctagttccaacttgaatagacatgaccgatcacatcttaaaagacaaggagatcctttgtgaaaaaaacaattttctgtatagcagcgtttgttgccatgttgatgacccctgcagcccatgtttttgcctcagaattgaactttgcggccaaggcccagatgccggacaatcaggtcaataaaggtgttagctattttgacatcaaaatggatcagggtgctaagcaggccctgcatgttgacttgcgaaacgatacagaaaaagaggtggctgtggatgttggcattgccagtgcaacgacgaatattaacggcgtggttgaatacggtcaaaatgccatcaagccagcgaaaagccttgcctttaacatgaaggattatgtcaaaacgccagctcaggtcaagattcccgctaaaggcagcacggttttaagtcttgatgtgaccatgccaagcaaaccactccatggcgtgatggcaggcggcattaccttgaaggaacatcagccaggcgatcaagctgaaaaagatgcaggtaaaggggttgccatcaacaatcgcttctcctacgtgattggcttattgatgcaacaaagcactgatcacgtagcggctcatgtgaaattgaatgatgttaagccgagtcagatcaattaccgcaatgtgatcttggcatccatggagaacgacgccgcgacgttcgtcaacaaagtggcggttgatgccaaaattacggctaaaggttcggataaatctgtctatcaagtggctaaagaaggcttgcaaatggcgccagacacgaccttcgattttccaattgcgttagaaggcaagacgcttaagccaggtacgtatgttgctcatcttgaggtgtatggcaatcagcaggcagatggcgggatgactcgtaaaacagctgatggcaaacagcattaccatgatcactggacgctgacaaagcaattcacgattaccgataaagtggccaaaaatctgaatcaaaaagatgtctcgattaaaaaagataatagctggcaattgtatgcactcattgctgttgtcgctgtactgatcatgattgtggcgcttctactcgtcattgttttcaaacgaaagaagaaggagcaagcgtcctgatcaaggatgaataagaataatggtacaatattcgtaagtattcagtgattaaattagtcgataaaactaatggacagggctgcgaatgaatcaatggcaacattgagacgttggcgaattggaacagtcatcttggaacggtatcttgtgtcgaacctaggtccgcatgggatgcaccaacattgtcgtgacactagattgactaagaaggaatatgagaattcgtgaaggacactgaagcggaagaaaaagcagcccaacaaaatttgcacatttggttatcggacatgtttactgccgatgaccaaagtgtgcgaatttttgatgtggacaggtacaaacaaagtgggaaaacaacgcaacaacaagcatatttggccaatattgcttaccgttttgctgggaaaacattgctggcacgtacaggtacgatctcaaaaacaaggtggattttgtgaaattacttgaactgatggaaaagaacgatcaaaagaaacttcagttactgtattatcttgatcagcatccgaatcgcaaattgaagaacagcgagttgcaagataaattgcagatttcatattatctttttaaacgccagaccaaagagattgctgaagatattgcagcattcgacttgagtgatttttttgcgatcgaagtgacgaacactaccgttatcttgcatgaatatcacaatacgaatgcatcggtttttttggaacattatctaaagcagtcacttcaaattaagatcttgatgacgctgatgcacgaaccaccagcatttaatctgaccgaatttgctgaggaacactttggtagttatgcctttatgtacaaacggtatacggctctgcgggatacgctcaaaagttggggcattgtgctgagtaatgatggcaagctgaccggtgatgaattggcgattagactgcttctgacgaaaatcatggtggttgcgcatattgatgaaaccgggtttgatgacaatgtttgcagtacgctgcatgagctgttgcagttgctgaagatgacagaagcaacgccgtcaatgagtcagctcattgagactaaagcgtattttttgatcagtttggttagattccagcaagggcatgtcattgccacatcaccggaaattgttgatttggtgcgcaatattcgcgagcgcacgctggaaaccagaaaacgggttattgcgatttatcaggcgcattttaccgcaagcgaccagacgattgacagcgagtgcgattattttgggacgttccttgccattattggcattattacgtcggaggagatcgtttttcccgatacaatcaaacagcacggccgggctttcattcaagggtttgaagccaattttgatgtacagttgacattgtctgagaaggccaatatcgaatacgttgtcaacaagtgtttgattgatgtgctggccttgccgtttaggagtgaattctttgatgatcatattgaagtcagttacttctttagaatgtatcccgaattctttgactattgtcagcaatttgtccaggcgcggtcggttaagttggataggaatcagtcgaagtttatgttttaccattgtctgttgaccttggcagccaatgtgcctttgaacaaggtgctggagccactttatgtctgtgttgatttcacgctgggcaaggagtacaacaccattattgaacgcgacatcaagtacttttcaacattgaatgtcaaggtgaccaacgaagtccggccagaaactaaattgattatcacggatttggtcaatgcttatcatgatacggacatttcaaaagtcatctggctgtcaccgccgcgaccagaagattgggagaatgtcattgaagaactgctggatttgcggctagccgatcgcacggtgaaaaaggcatgatgagagcagtgtgatcaacctgttcagtggcatgccgaagccagtgcataaaattcttaagtttatgaaggttataaagttttggtgagatgaccgcaaatggtatactcgccttaacaaatacttggaggcgaggcacgatgaaaagagaaaacgattttgggccggctattaaggactttttctttcgggccggtgactttaagggtgttagttcacgaccacagtattggtggcttttccttgcccaatttttattaggattggctgctggtgttctgttcggcattgcgattccattttctctcatggatagtcattcgttaggcagcaatatcatgttcacgctgacaacgttggcattttcaatctttgggtatcttggctatccacagttgagtttaaccattcgtcgttatcgtgacgctaaagttagtccgtggtggtatctgggtattattatctttagttttatcggcccgttgctggcggttagcggcatgggctggtggttggcactactgtttcctgtaattggcgccattgctgacttggtgattctattgcttccaagtagagaacaggaagtcgtgccgtttccggctcaacctaacacgcacggttcgattggtgttggttttggcacggcggttaaggatttcttcatccgcggtggtgactttactggtgagtccagtcgcagtcaatattggtggagcattctgtttagcgtgattatcattatccctacttttttgtttatgctcttctcaattatgtcaattattattggtggcgcggcagtcagcggatttaatagccaaaatgttgaccatcttgtcaattcacttggtactggggcgatcatcattgggttcattatttttgccattatttatgcatggtcaatgttagctttgccagcattgacagttggttggcgacgattcaaagatgccggcgttagtccatggtggttgattgcgttcaatgttgtatcagcatttctatcagctcttgatcgaaatgcgggtaatgtgccgttaagcctaattgctttacttcttgtcatcgtccaaattgtcatttttgctctgccaaccaagttccgtgacgatgaggcataagcaccactcaatgtataaaaaaatgcagccgcggctgcattttttaatgaagtaaaggtctcgtaacgttggctaatagatacccttttcatcctcatctactagcggatcattgaagtttttgtggaagtaggtgctgtcaatgatcttgaatttgccattggtgaagcgagcgatgatctcaccgtattgtacaatcaattgctccgtgttggggatgtcaattttgagacggccaatcggggttttggtgaggtattggtaatttgcgccaaagaagcctttcaagtcgtcagtgctggtttcttgtgagtaaggtaagaagtgggtcatttttgcagttgaaaaagctgcgaattcaccttttggaaatccttgtagtgatgaaggcatttgtgtcatggtgtgattcctcctgattaaagtgctttgctactgtggccaaaacgcgtgattcagcagcgctgtttggttattaatttacttatcatgatggtaacacaataatagaacaattgaatgtttgcgccgcggcctgaaaacgcttaatattaagtctggacgttgatcggaggtgagcatatggatcaaagtctatttcaaaatggtaacttccaacctttggcgagtcgtatgcggccacagacgcttgatgagtttgtcggccaaacgcatttgctagggaaggataaggtgctcagcaatcttatcgaacatgacgagattagttccatgattttctggggtccgcctggtgtcggtaaaacaacattggcgcggatcattgctcggcgaacgaaggcacagtttgtgacattttcagcagtcaccagcgggattaaagaaatcaagcaggtgatgaaagaggctgaacagaatcgggagctgggtcagaaaaccattgtgtttgttgatgaaattcatcgtttcaacaaggcgcagcaggatgcctttctgccatatgtcgaacgtggcagcattatcctgattggtgcgacaaccgagaatccttcgtttgaagtcaatgcggcgctcttgtcacggacgcgggttttcgtgttgcacggcttgaccagtgctgaattagttgacctgttacagcgagcgttaaaagatccgcgcggttatggtctgcagaaggttaagatcggcaaaaagctcttagctcagattgctgattttgctaacggggatgctcgaatcgctttgaacaccttggagatggcggtgacaaacgccgaaaccaaaggcggcgtggtaacggtcacccaagcagatgtggcccagttgttgacgaagaaagccttattgtatgacaagaatggtgaggagcactataatctaatatcagcattacacaaatcaatgcgcaattccgatgttgatgcggccatttattggctggctcgaatgctggaagcaggggaagaccccttgtatgtcgctcggcggctagttcgatttgcgagcgaagatatcggaatggccgactcacgcgcattggagattacaattgctgtttatcaggcgtgtcaatttattgggatgcctgagtgcacggttcatctcacacatgcagtcacctatttggcacttgcaccgaaatcgaatgcactctacacagcgtatgaaggcgcaaagaaagatgcgaccgaaacgctggccgaaccagttccacttcagattcgaaatggggtaacggatttgatgcaggatctgggttatggtaaggactatcaatatgctcacaacacaaaagataaactaacgaccatgcaaaccatgccggataatcttatcggcaaaacgtactatcatcccacgactcaaggcagcgaagccaaggtcaaggaacggctagagcagatcaaggcctggcatgcgcaacaccctgaccccgattcgccgaaaaccaagaaaaagtcatgatgctgtgcgattacgtgtgcggcaatccgactacccgtttagaggaggaaaaaaacaatggcaaaaattctcgcagtcaacgcaggcagttcaaccctgaagtggaagctttttgatatgccagctgaggttcagctggcagaaggtttggttgatcggttgggacagccgcaatcaaaagttaaaattaagtatggtgatgggcagaaatatgaaagcgatacgccaattgctaactatcaagaagccgtcgccagtttgatgggtaacatcaaggcgttagggttggttgaacatctgcatgagattactggtgtgggccatcgtgtggtagccggcggggagacttttgccgaatccgttgtagttgatgatgctaccttgttgcagattcaaaacctgcgtgactacgcgcctttgcataatccggttgaagcagattacattgatgttttcaaaaagatgatgccatgggccacagaagtcgcagtgtttgatacggcgttccatcaaaccatgcaacctgagaacttcctctacagtattccctatgactattacaagaaatatggtgctcgcaaatatggtgcccacgggacaagtgtgcgttacgtcagcgcgcgggcagctgagatgcttaacaagccgttagaagacttacggatgattgtgatgcatttaggctcaggctccagtgttaccgcagtccaaggcgggcagtctattgatacttccatgggctttacgccgttagccggggtgacgatggggacacgatccggggatattgacccatcacttgtggcttatctcatgaagaaacttgatgtccctgatgtggggcaaatgattcatatcctgaacaacgattccggcctgctcggtatttccggcatcagcaacgacatgcgggatctggaagctgacgaagataccaagccacgcgccaaactggcattggatattttcgttaaccgcgttgtgaagtacgtgggttcgtacgcagccttgatggacggcgtggatgtgcttgtcttcacagccgggatcggcgaaaacggtgacgagattcgcgacaagatcatgcgttcactcgattacctcggggctaaaatcgaccatgacatcaacaacaaatcgcacggtgttgaagctgatctcagcacaccagattcaactgtcaaaacattgctcgtgccgaccaatgaagaattaatgatcgtccgtgacgtcatggcactgagctaagcgttaatgacttctcaattaaaaaaccatctctcgactgaaggagagatggtttttgtgtctgcataagtttctgaggaatggacgagcaaacagacaattaattggcgttaatcccctgatctgaatcaatcatgactcctttcgtttcatcgaaaacacagatattgccgtaattttctttataagtcatatgattgccgccatcaataaagtaccggggtgattcgtcaggatattgaatgactttaaccgggcatttaggataaccgtcactgaatgaagttggtggtagagatggtttgacattgttttcatagtcgccataaatcaaggcagttggcgtgtgaccggtgacaatcgttttagcgatcggattgtgagcaaaaatgggatgttcccgatttttggtttcgtccatattatagatatacggctcacgcacccacattcgattaaatggcgtcgtttcttttaaagggtcttccagcgagaggtctagaccggcgtggatgagcaacaacttgtcaaactcaacagcagttggcatctcggcgatgaattgaatcagcggtgacatgtaggtcaacacggcttgttgtaggttgcttttgagtgctttagctggcgcgtaatcttgcaccatttgacgtaaggtagccttgccgccattgatgaaccatggattatctttgtcggcgagataatccagcagcatctgatcatgattgccacggatcgcgattgcctgactcgcctgcacctgctcgtgaatttgagtgagcacccgcccgccgtatggatagccatcaatgtagtcacccaaatagacggtcaaagtatggggatactttgcttgcatcgcccgcactcgatccattgtttccagatgaccgtgaatatctgagaccacgatcatggtcataacgtttgcctccttataaaacgcattctccagtcccaaaacctgcagatagggcttttggtcgcaatagtcagcgcttgactgtcacgcttaaaacgacttatatttcggttcctaacaggactgcgccgcgttttgcaaaaactgctgataggatcagtttactttatttttagaagaatgtgcgatattaataggggaataggggtgaaaagatggataaatgcttaatcgtcatgcataatctgagccgtcattatggcaaacaatactggtggcagcagcattcattggaagattggctgatgatgattctcattcagcgcaccagttcaaagaatgttgcccaagccgtgcataatttgcaaccttacatgcaggttgatcgcttgatggcgttatcgcaatcagagctggaaacgttggtgcggccagccggcttttatcggcaaaaagcgcagcggattcacgatctattgacgtggtttgtggcccaaggcggtagttttgagaagattgcagaaaaaccggcagctgagttacgtgaaactctgctggctctaaatggcattggcaatgaaacggcggatgtcatgctaatgtacacctttggcaaaaaaacttttgtagctgatacgtatgccatgcgtcttttcaaccggctcggttttggaccgtatacgaactatgccaaaatgcaggctgattttgcgccagcacttgatcaaatcacgttagacgaagctcgcgaatggcatgccttgattgacgaacatggtaaaacgcaagttcggcatgcgtatgatgaccgatttttactgcagccagatttgactgaggcggcatggccgccggaagcggttcaagtggagccgccccatgatgatccgggtagcggcaagtggcggcacgccgccgatccgtcagcgatgactcataaataaatgctttttgctcgtgagttgttttggcaatcttgtcacaagggagacctaaaaatgaatgctagcgttgctgtgcaagtgttaccgatgtatccagagaaacaaaaggtcttggcagtggttgatgcggtgatcgcctatatcaaatcaaccggaattaattatgaagttagtgcttttgaaaccacaatggaaggcgattatgatcagctgatggcgattttgaaagaaattccgattgtcacagcgaaggcaggcggtactagtcaaatggtgtgtgcgaaaattaactattttcctgaagatactggcctgacgattgctgacaaggtgacaaagttcaagcattgaagacaaaaaaagatcacggcgtttgccgtgatttttttgcgtcttgaagcttatttttcgacagcttggagcttttgattgtcgtcgagttgtgagatacccattaagtgatgacgttgtaagagaatcattgtgccccacagcaacaggagcgagccgatcgtgaaggcgatcaataccatgaagccgagggtgacagtgctatcggcaatgccgccggtgagcgcgttccggaaattcataatggagtaggtcattggcaggaatggatgaatggcgttgtagaactgattggtgatctccatcgggaatgtcccgccggcaccacctaattgcagcatcaatcccaccatcgccacaaatcgaccaggattatcgaatgccattgagaggaacataatcagatacattgacgtaaaggagaagaggatcgcggtcagatagaacaagccgatgttgtcgaccttgagaccggtcgccatcatcaaagttgcttcgagaactgcggtgccaagggcaacagctccgccaatggctactttgctcaggaaccactgagttgccgtaccatctgctctggaaactttgcgaattggataggcaaagttgaagaccaaggcgccaacgtaaagtgccagactcaaaacgtatggggcaagtgcatggccgtagtttggcacataagaataatgcttttgcgctgtcttggtgggtgcagcgaacatctttgccgtatcaccggttaacgtaatgccattgaccttacgggcgctgctggtaagtgtcttagcgaacttcttgtcgccgtcttcaagctgactggaaccagatttgagtgtgtcgctcttgtcattgatttgaccggttccgtcggcgagttgattgacaccggataccagtgtcggcacactagcgtttaattgattgacaccgccagcaacttggctggcaccattggttagctgaccgacaccattggtaagtgtcggaacttggccatttaaggtaccaagaccgccggatacttggctggaacccgtgtagagttggttgataccactggtgagagcaggaacttggttgtttaagctaccaaggcctcctgaaacttggttagaaccggcgtaaagttggttgacgccgctggtgagtacaggaacttgatggttcagggtgctaaggcctcctgaaacttgactagagccagtataaagctgatctacacctctaactagtgaaggtgtttgtgttgccatttgccctatgccgtcagtcagattgtttgcgccagttaccagttggtcattgtttgcaataatttgttttgaaccgctttgaaggccaataattgctgccgttaaagtcggaacttgttgattcaaagtcgttaaaccgtttgttagttcttccgaacccggaatcaagctttggttgagagtcgtggccattttggcgccattagtttgagtctgagaaatcaaagcgttgacgcttgcttgaatttgctcaaagcccgcaatcaattctgggttttgattgggttcggattttaacttagcttcatattcagtgagagtgttctgaagcttgggcaaggatgcggcagcttgctgattttgtgaatcaacggatttgcctacttgttgaagaccttgtgttacttgagatgaaccggttaccaatgcttttgttccattatctaaggaactggtactgctagcaagctgatcaatgccgttagagagtgtcgtcacgctttgcgtatagttcttgacaccagttgttagcttttttgaaccagtttgtaattgagccgtaccgtcaacaagtagtcctgcttggctctgcaatgtgtctaggccactggtgaccgcatcagatcccgttactaattggcctacgccggatttgagcggggcagtctgagactgcaaagacgctaaaccactagtaactttattagatcctgttgctaattgccctacaccagatttaagtgtgccagtttgcgattgcaaggttcccaaaccgctcgtaacttggccagatcccgccgcaagctgattaacgccacttgctaggtttgtcgtactgccattgagcgtttgcaacccacctgcgacttgattagcaccacttgcgagtttaggtatttgtgaggacatcggtgcaactttaaccttcatcgtttgcacgccgtcatttacttgcgaaacggcgacggtgtactgatcaatgccatcgtcaagcttgacttggccagcatcaatttgggtagcggcgccggctgccgttttcatgccattaccgatagtcttaatttgatcaaaaaccgcgctggcataggcgttggtcacgttggcacgaatttcggagttgagactgtcaacgccgatgccggagatgacttggccaatatagttgagtgaatcatttgtctcgtacttcagtgtcattttcttaggatgctcgtctaagacggtggcggcatttttggaaaaatcctttggcagcgtaatgacagtgtagtatttgtccgctttcatgcccttttttgcttctgcctcagaaacgaaatgccagccaagttgatgatttttcttgagcttggtcaaagtctgctcaccaacatcaagctttttacctgagagcgtaaaatatcttgtgtaaatgcataaaagatttctgaattgtatagaaatagggaatgccttcccttatgatatttagtaaccacagaaaacatcacaggaggcattccccatgaatgaacttaccacagaaattatcgctgcactagcccaaaagcaagatttggacgaagtttttcgtcaccacctcgaaattgcgattaaccagctgcttcaaaccgaattggcagagtttttgggttacgaacgctactcatacgttgggattaacactggtaataaccgcaacggcagttatgagcgctcgtttgatacgaagtacggccaacttaacttaaccattcctcgagatcgcaatggccggtttgaaaatcataccttgccagcctacggtcggcacagtgataatttagaaacaacggtcattcagttgtataccaagggaattaccactgctgaaattgccgaactcattgagaaaatgtacggtgctcactactccaaagccacggtttccaacatgactaaagccgtcaatgaacaggttcaagctttccagcaacgtcgactggcttcacaatatgcggccatcttcttagatgccacttacttgccgttaaagcgggataccgttcaaaaagaagccgttcatattgcaattggcattcgtccagatggtacgaaagaagtgctgaactaccaagtggcgccaacggaatcgactggaatctggactgaactgctgggaaccttgatcaagcagggcgttaaagatgtgctgttgtttgtggccgatgggttagttggtttggatgaaggcttgaatcggcatttccctaaagccaaacgacaacgttgcctggttcatgttgggcggaatctgatgaacaaagttcgcgtaaaagaccgcaaggccgtgatcagtgactttaaacaagttcatcgggccgccaaccgtgaagcagccgaactgaaactgaatgagttcgccaacaactggcatcagacctatcccaaattaatcaaagatctgcttaaaatgccgaatttactcactttcctggactttccaccagctatccggcaatcactatactccactaacctgattgagaactttaataagcatctcaagcgcaccacccaccacaaagaacaatttccaacggaagattcactggatcgcttcctggtttctcagtttaatgtttataacgagaagtctctgaagcggatccaccgagggttaaaaggactccaggacaccttggaagcatcatttatttaagttagatacatattatatgtacgaaggcatttcatttacacaagattcttgacgctaccttttaccttgataggtgacaggttggtcaaggttgaccactgctactggcaaattcttggtatcgccgtaaggatcccagactgacttcaaaaagaagatacagtagagaaatgggattaaggtaatgacgagaactgagagcaaaatgagtttgtttttgccgatgaacttaaattcatctttgatcatgtcgagttactcctttacttcactgagatagagatccagcagggattcaaaagtcgtatcgcggctaggttggccatctggcaaaaagcccatgacttccagaacggtaaaaccgagcacgctgctgataaaattttggacgaaactttcttttgccatgtgtttgaactcggtatgagtgatcaagcgttttaataagccgatcacatcgccggttgcctgaacaaatggactgctttctggaaaatgatgcacaaagtaaataatttcatccaatgattgttgctgttcgaaatagcgatgcgtggtttgcgcaaaagtgcgaatggcgtctttgccagcaatgccactgacttgttcaatgagttcttgatgtaagttgtgcatgaactcagtccccagcgcctcaatcacggcatccaagttactaaaatagttgtatagcgactgggaacgaatattcaattccttagccagtgtctggaaggtgagctcacgaataccatcacgggtcaccatcacccgggcagcggcgagcactttttcacgatccaaaatacgatgcttgatagccatgcgacctccttgagttatctatattacgttagacgaatatacgccgatgatttgaagaatgcaacctacagattgtagattgtcaaaaaataggagtaatcagacgtgtggtgttgcatgtgcgtggctgttcagtggccgatcatcgatgtttttttgtcatcatgcgcagtctggagactagctggttgatctgcgtgcacgaaaaaaccgcacccaaatattggatgcggctgatcatttaatggcggtttattgaatgacgtggcgattaggatcgcgcaaattgaggataaacacaagcaccatcacgatgaccaccatcacgaaaacaccgtgtaagccagtgagaatggtggcagctacctgaggatcgtggcttttggcggcagcattagcactaatcgcggcattgacagctttaaaagtgttaccgtgcaaattagcgcgaatcacgagcgtcaaagtggcaccatagataccggtcatcacagtttgcccgagcgaacggccaagagttaggatgctggtggcggaaccaacgtattctttgccaacaagatgctggctcaaaacggtattcatactgatcacaatgcccatcaccgttccgttaatcatggcaatgacataaaaagcccaaaccggaaaatgcggggaagcaatggtgagcaataagtaagctaaggtcagaatggcgacgagccaaagtgtcatggttcgcggcacaaagcgtttgattaatggaccgaccaaaaatgaagaggcgagccaaaggacagaactcgatgtcacaactaaaccagctgttgtcgcgccgagatgatacaacgactgaagccagatcgggaagtaaacttgatagccaatcaagacaccgctaagtaacaaggcagttaaaatttgcactgtgaacgtgaagttatgaaacattttcggcgcgatgagcggatcgggggctttctgttcttgatggtacaatagcaagccagccacaagtgccaacgccaacaaaacaccggcgagcaccggttgccgatcaagcgcctgaatgccaagtagaagtgcaatcagcgtcaccgccaaccaaagaattcctaaccaatcgatcgtgagaacgccgtgttcacgactaggttcccgataaccgatttgaataagcagaaaaacgagaataccaagcggcacattaacgaaaaagacccaatgccaagacaattgatcaaccagaaaaccgccaatcagcggcccgaccaaggcggaaagtccccaagctgtgttattaagggctaagacattcgcccgatgagcaaaatcataataatcagcaataatggtaaatgtcagcggcatcacggcgcctgcaccgataccttggagtgcccgcgccaaaatgagcaagaagatatgcggtgccaacccgcttaacagggtaccaagcgtgaacagtaccacgccccactgaaaaataccgcgcctgccaattgtgtcagctaatttaccataaatcggtgtggtaatagcggttgtgagcaagtaggcactcatgatccaactttgatatgccaatccatgcaggtcactaataatcgctggcaaagcggttgtgacaatggtaacttcaacggaagtcatgaacgtggcgataaaaaccgccgccatgacaagcccgcggttctgaggttttactgatgtggacatcttgacatctccttgataaatccattttaccagtcagggtcaaggctgcagcacaaaaaaacgcccggtaactaaccagacgcgtcgacgttctagtgacatagcaggcagctgcggtcaataccgatggcacttccatcaggaaaacaataataccagcagctgtcaattggccaatgattacaagtccaacacttccgatcaaagcgaagagtcgcaatcaccaatcaaactgtgacaatgacaaaacatctccgaatgttcaaactaaaagtcagtccaagaatctttgttggccggtgcatcatcaggtgaaacatacacgacgagttcatcactaaatcgtttgagacagtaagcggcggcgccaatcagcgtcacggccatgaccgtttttaaaagatgtttgcccataagtgacctccttagtttgccttgattaggaaccattcatcattaccttcattctagcacggtaatgttcaggatgagtccagtttagcagcgagcgttttcagaatagtttctcagtaggtgttgtgcacgctaaaatctggtacaaaccgattttttaaaatatttaaggcattttaagtgaatttaagccaaagtaagtgcttttttcggaatctgtgttatactgaggtcattaaaatcgaaagtaggtatgagcatggatacaaaagtaaagactgttgattactcatccaaggaatactttgacaagatgaccgcttattggcgggcagccaactatatttcagttggtcaactttatttgaaggacaacccgctgctggaacggccactgaagagcgaagacgtcaagccgcatccgatcggccattggggcacgattgctgggcagaacttcatttatacccacttgaaccgggtgatcaataagtatgacttgaacatgttttatattgaaggcccgggtcatggcggccaagtgatggtttccaattcctatctagacggttcgtattcggagatttatccgcgtgtgtcgcaggataaagaaggcatgaagaacctatttacgcagttctcatggccaggtggcgttgcttcacatgcgagtgcacaaacgccaggttccatccatgaaggtggcgaattaggttatgctttgagtcacgcaaccggcgcgattcttgataatcctgaggtcatcgcggcggttgtcacgggtgatggtgaaactgaaaccggcccattggctgcatcatggttcagcaatacgttcattaacccaatcacggatggcgcgattttaccgattgtgcatatgaacgggtttaagatttccaacccaactatcttgtcacgtaagtcagatgaagatctagacaaatacttcagtggtatgggttggaagccattcttcgttgaaggcgatgatccagagaagctgaatccggaaatggctaaagttttggatgaagcaattgaagacattaaggccattcagaaacatgcacgtgagactggcgacaccacgatgccacactggccagtgattattttccggtcaccaaagggctggacaggcccgaagagttggaatggcgaaccaatcgaaggttccttccgtgcgcaccagattccgattcctgtcgacgctgaagacatggaacacgctgattccttggcaggctggctgaagtcctaccatccagaggaactgttcgatgaaaacggcaagttgatccctgaattggctgcattgccgccaaagggtgagcagcggatggctgctaacccaattacgaacggtgggattgatccgaagccgttggtattgccagattatcgcaagtatgcgctggacaacaaggaacacggcaagcagattaagcaagacatgatcgtgtggtctgattatctgcgtgatttgatcaagctgaatccgcataatttccggatctttggccctgacgaaaccatgagtaaccggttgtatagcttgtttgaagtgaccaaccgtcaatggctggaaccaatcaaggaaccggctgaccaatatttggcaccggctggtcggattattgactcgcagttgtccgaacatcaggcggaaggctttaacgaaggctacacgttgaccggccgtcatggcttattcaccagttacgaagctttcctccgggtcgtcgattccatgcttacgcagcacttcaagtggattcggaaggcacatgaagaaccatggcataaggcttatccaagtctgaacgtggtctcaacatcgacttccttccagcaggatcacaatggttacacccatcaggacccaggtattttgacacacatggctgaaaagaaggctgaatacattcgcgagtatctaccagctgatgccaacagcttgctggccatttctccgaagttgttcagctcacaaaataccgtgaacgtgctcatcacatccaagcagccgcggccacagttctatagcattgatgaagccactgttttggctaattccggcttgaagcggattgattgggcttccaatgatgatggcgtcgaaccagatgttgtcattgccgctgccggaaccgaaccaaacatggaaagtcttgctgccattaacttgctgcacgacgccttcccagatttgaagattcgcttcattaacgtggttgacctgctgaagctgcgcagtccggaaatcgatccgcgcggtttgagtgatgctgaattcaacagctacttcaccaccgacaaaccgatcctcttcgcttatcatggctttgaagggttgattcgcgacatcttcttcactcgcccgaatcgcaatgtgctgattcacggctatcgtgaagaaggtgacattaccacaccatttgacatgcgggtactcaacgaacttgaccgttaccacttggccaaggatgttattcagcatgtgccagcctacgctgaaaaggctgccgcgtttgttcagaagatggatgataccttgcaatatcatcatgacttcatccgcgcaaacggcgatgatattccagaagttcaggaatggacctggaaaccaattaagtaacttcagttgtctttcaaacacttctgcttgcgcaggggtgttttttttgtgccggactagcaagttggcgatggcgcggcgattcacgaaattcacatatttaaaaagtgggacgtgagactttgatgagtaacttctgctggtaaaaaggccacgaaaacaagtaatatctgcaaattttttctttactttcttcatactctaatgtattctcaacgtaatatcattttgagggtgagtaaatgaaagttaaacgattggtagcaggggcaatggtatttgcctcagctgcactcttggccgcatgtggcagcgagagtagcagcagtagctcagaaacttttaatcgaatggaaaaagatgttatttccacaatggataatgcccacattacggatgttattagtgggcaagccgccgttgatactggtgatgggttgtatcggtataaaggcaagaaattggaacctgctgttgccactaaagtcgttaagccaacgaataacggccttacttatacattcaacttgcggaagacgaagtggagtaacggcgatcctgttactgccaaagatttcgtcttcgcgtggaagcgagcagcagatccgaaaactaagtcagaatatgcttatcttttctctggcattaagaacgcggatgacatcactgctggtaagaaggctgcttcaacccttggtgttaaagcagaaggcgattataagctggttgtcacgatggatcggccagtaccgtactttagcacgatgatggtcaatccggtcttcttcccattgaaccagaagacggttgataagtatggcaagaagttcggtacgcaaagcaagtacttggtcttcaatggcccgttcaagttgactaactggaacggcactggcaattcatgggatgaagtgaagaacacttcttactggaacgccaagcaagttaagctcgataagattcacgttcaagtggttaaggattccaacactgccgctaacttattcgctacgaagaaacttgacgatgcggttctgaccggtgaaattgctaagcagcatgccaaggacaaggattacgttggcgataagcaaggtcggaccacttacttggatatgaacgaagaaaaggtacctgacttcaagaatctgaagttgcgtcaagctgttgcgatggctattaatcgtgatgagtttgcgaataaggttattggcgatggttctttcggaatctcaacgattacaccagaaaactctggcagtaatccaaagactggcgaagacttctccaaggaagctgctaaggaatctaagaccgttcagacatacgatcttaagaaagctaagcaactttgggctgaaggtctgaaggaagtcggcaagtctggtgaagatgtgaccctgacgaccgatgacacagacgttgctaagaagtctgctgaatatctgcaatctgctttggaacaattgccaggcatgaaggtttccatctcttctgttccattcaagacccggatccaacggtcattagatggcagtgcccagttcattctctccggctggcaaggtgacttcccagatccaatttccttcttggatctttacacgactggcaacacttacaactttagtcactggtccaataaacaatatgatgatctgattaaggcttctaagggaacggatgctaacagcgaaaccaagcgatatgatgatcttctgaaggcacaggaactgctttctaaggaatcacctgttgcaacgctttatcaaactgttcaaggccatttgcgcaatcctaagctgaaaggtgctaccttcagcccagccaacatgtataactttgttggggcttatatggctaagtaatattatcaaaatcaaaaaaaatctccattttgttcagttcaaggtaagttgactggcgatggggatgttttttttgttctgaataatgctgtgcagacagacaaaacatgtcttgggttggtaccgaggtgggtaggtatcgccagtcactttaaaataacaaaatcatatttatgtatcattgacaatgatagtgatatccgtttgtaaatccaatgatgaaaaggaaataataatcgaaggttgtgaagaatctctaaaaataaaaaaagataaatgattgacgttttagtgaatgaaatgtacttttaaccatatccaatgcaatggcgttacatcaagggctttatcgctgccgattagaaacatggaaaaagtgtaggcttgtaaggaggctaacattggtgttcagtaagcagtattggaagactaaatcaacgatcgctgccttcttattggcgttgctgtttctcttagggcatctcttgggcaatcttggctacgaagttaatggtggtaagcaagtggcgggatacttctttttctcaccatacatgaactggctaccagtcgatatttcctcaaatttaccgattgcttggaacatggcagcaccgtcgtacacggtcagtggcgtgtccggcttcattttagacaaccgatcactaaacagaatatgaaacatatgaagtttcaactggcccaacagcgggaggggcgggaagtaccaaatgaaccacaggccgacttgagtcaagatcagaaagtgatcacaatgatggatgcgtactatagtcgggctaccgacaatcgggttgtgatcacgaccttgccacaagcactaaactcgcagaatctggttcagatcgtaccatttgaatcatcgagaaaataaggcaagagcatgttatgtgagctgtgtttaactgaaaagaggttgatgatgttggtgcaagaaccgaatgatttacgctttcaagtgcatccgcaggctaaatttgatgtccgggcggcggtgttgttggtgcatgcaggccaacttttagcgacagttaactcggcaagcggtatcgcccttgtgccaggtggtgcggttaaatttggtgaaacggcggcagaggcggctgcccgcgaagttcgtgaagagctaaagctgaatgtggtacctcaattggtggggatcgtggaatcgttttggcaacagcctgaacaaacttaccaacaactcatcatggtacatcgggtgacgttgactgacgcacaaaaggctggtttggtttggcaggaaggcttggagggcgagtggctgccgtttgcaaaggcagccaggatgttgcagccgcgatcactggcacagtttttaacctccggcgatgcaattcgccaccttgtcgaccatcatacagaatgacgcttaggttgacgctggtagagaggtaaggctattgatactcggatcaacagaagcgcctaattataaatagtataattaaagcggattactttgcctttcatcgttttcattgatacgcttaaggtaggctaaaggccggaagggagttacatcatgatggatatgacgactagaccgacactgcagcactttttatctgacacgaaacatggaccgtatgtttcgctttatatgtcttggccagagaacacctcggttgaggccctgaggttgcggttcaaaaacatggtgaagcataccaagagcgtcatgaccgagacttatcctgaaacggacttttcggcatacgcggctgaacttgagccatatgaacaagacccaacattctggcaaacctgcgaaacaaatgggtttggcatgttgacaaatggcgcgcagacttatgtgacgccgatgtatgaagaggttgatgaagtggcaatggttactgacatgccgcagattctgccactgatgctggatgaggcaacggcaaccgactttgatatcttagcgttaaatgccgacagcattcagatgtatcataaccacgggcatcaggtgcggccgatatcgttgccagacgatgcaccgcagactttgaagggaacgctaggcaccgaaattcgtggtggcgaaacgaacagcgtgtcccaaggtggcggacgtgtgacccatcacgggcataatgagaagtcagcggaaaaagccagcgatcagcgtcgtttttatcaagcggtggatcagtatgtgctggccaatcactccaatccacataaaatgccgctcgtactcatgggcttagcggaaaacgtggcggtattccgcgaaatttccaagaaccatcatctgttaccgaagctggctgtcgttaagagcccagcaaaccttgattttgttgaattagacgacttgttgacgccagtacgcgacaccttgcgcgatcgccggcgccagaactttgccgagatcatcgaaaatgctcgcggaaatgacagctacacggatcacttggaagaagtcgttcaagcagccgctgccggacgaatcgccattctttttgtccaagccggcgcacggattcatgcgcgtcttgaaggcacccaaattgaacgcgattcgatcaatgcacagcacgctaatcttttaaatgacttagctgacatcgtccttagtcatggcggacaagttgaactgctgacagaagcctacttgccagtcgaagtcggtgccatggtgcgttacgcatagtaacagttgattattaaaaaacgagttgcctgttgtcgggcaactcgttttttgcggttagtatcagtgcgtctttttgggattgatccatgtgagtaagataaggctacggttttggcatagtccaaattgtctgcacaatctgttctgccgttttcaaactagtgtcattgaccagtggccgggggctggcagtggtgagccaatgtacaccttcagtagggacgccccagaagaagagaccaggttgagggtgttcgttggcgtcaagcagttgttgggtttggcgatcaacggcgatggcgccggattggaatcgcttgtcagcgttcaactgcagctcatatgtgtgcgcatagccgtcatgcaagagttgctgaattaatgcattttgcgcagttggtgcattgacagctggcacacgcgcttcgagtaaacttttggcctgaactgaaaagctgggatcacttggcgttttcagcaaaaattgaccgtcgatacctttgatttgcatccccggtggcaaaatggtgatgatcccggcgcctagcaaggcctgtaattgatcaattcgcaacgcaggcggcccaatggagagaaagtcattcagtgagttaaaccagcgcaagaagaaatcgaggtactgatcttggctcaacaaaccgcgttcgacgagttggcgaatcgggtcgcgcatatcacgcaaaacttctagtgcgctagttaatggcccagttttggtgccacgcatggcctcgcgtgcatctcgacgcagataatgtcgcataaagtcttgataaggctgaccgcttggatgccacttggttggatcagccaaggcatcccaatcaagtcgatctttggcggcaattggcaatgtgcctagtgtcgtgacgggatcggcgacgaagtcatgttcaaaggcagtcacgtctagatcggggtagcgctgaatcaacagaagccgataatagaccagttcaacttcatgttgcagtgcttcccagaaggtttgaccactcacttcgccatgtgcttgccaggcttggatttgtttagtcgttaaaaactgcggcgcccattcttcaccgggtcctttttggttgcgacctttcgcccggtaaggaaaaccacgtcgagagccagtgaaaatatgcggttcacgaccgctgggatgataagccagcaagccgtctgctgttttctggaagcggcctccgcggccttcagttaacctgctcattaaatcaaagaagcttaagccaagtccgcgaatgatcacaggtgcctgcggttcgatggtgctaaggtcaccttcttcagggaaacctggggcaagataaaacaaatcatgagcgtgggcgtaatcagccaatgctttttgatcgcgcgtcagggaattcttgaggttgcctagcgccatgacaacttggtcggtgtgccagctttcttgatcggtggtaattgtgaaattagcggcgtttttagctaaactgacaacggtttgctgcttaaacgtgatgctattgttaccagcgcgggctacaagcatgtcaaagaaccaatgctggtagacaccataaagtgcccgtgaagcgtagttgttgggtcccagtgctgctgcctgccgcagtaggatcgcgcggttattgaactcagggtgagcatcaaggtaaccagatgcagttgtgagtgcccatgtgctcagatcaggtccggtcaagaatggaccaacattggtgaccgtttgatcagtgaataaggtgatctgtgacgctgctgtattcatgataaggttcggatcttgatcgattttccaaacgcgtccgccaattggataaggatcggtcagaacgatggtgagttggcgttttggaaagcgattttgctgccagctgagtagccgttctaaaattaataagccgcgagggccggcgccgatgagggtgatgtgcatgtgcagcgctcctttatgagttgaatatttgtgaagcaacgatttcattatacttgtaagcgccagaaagcggttagcgacatgctttaggtttagccattttcgtgtcataatgtcattattgacaatcttgaaaggaaggcagatgctgatgaaagttgtcgttgtgggctgtacgcatgcaggaactgcggcagtgcgcgaactgttgatgaagcacccagagacagaagtggatgtctttgaacggcgggaagacatctcctttctttcttgcggcatcgcgttataccttgaaggtaccgttggccgattggaagatatgttttatgctacgccagcttctttagaggcgctggggccgcatgttcacgttcatctcaaacatgatgttttaagcattgatgccgctgatcatcggattttggccgaaaatcttaaaacgggcaaccaacaacattatcaatatgataaattagtcatggcgacaggcagttatcctgttgttccgccgatttcaggtgtcagtattcctcgggtgctgatgtgtaaaaactacgatgatgctcggcgaatcaaagaaagtgccaaggatgctgagcatattgcgattgttggtggcgggtatattggtgtcgaactggcggaagcctatagccgcaaccataaacaggtaacgttaattaatggtgtttcgcctttacttagtcattatgttgacttgccacttagtcatgaaatcagtgaggccctgacaacacgtggggttgagttgaaacccaacacagttgccaagcattttgatagtgacgagcagcatgtttttattcaaacagataaaggcgaaatacaggcagatttggcggtggtttgtgtcgggttccggccgatgaccgagttgctgatcggccaagttgatatgaatcctgatgggtccattcacgtgaatgattatatgcagaccagcaatccggatatttttgcagctggtgatgcggtcgccgtccatttcaatcccactggtaaggacgcttatgcgcctttggccaccaatgctgtgcgccaagggatgatggctggcgctaacttgtttaaaccaacgattaaatatatgggaacgcaagccacaagcgcgctgaagttgtacgatcataacttaggtgtgacgggtttgacgcttgctcacgccaagcgcaatcacctgtcggctgccagtgtcacgatgacggatgattttcgaccgccattcatgccggacaccgtcaaaattacgatggtgctcgtctatgatactgatgatcgccggattctgggtgcccagttttatagtcaatatgatattgtaaatgcagctaatctcatttctgtgatgatccaaaatcgtaacacgattgatcagctggcttatgtcgacatgctgttcaatccgaattatgataaaccgtggcattatttgaatctgttagggcaattggctgtgacgcaagcagataatacgacggcgtagggggaaaattatgaattcgtggaatcttatcggactgttggcatgggtgatactcatcgcctatttgattttcatcgtctggcacattcggcaacggcacattaaagcaattgttaaatccggaaagcaagttcgtggctcggtggtgttaattgacattgcagaagtgcttgtttttgcgattgccgcgattggcatggtttgggtgagctggttacggcctattgattatcgtgatagtcgtgcggtagctattagccacagcgcagaacatctcattttacaaactggcgaggatcattccttttatgttcgtgtccaaacagggaatggtaagaatccaaccttgtactacacttactggactaacggcgctaaatacgaaaatacaagtcacaatgctgaagttagtgccggtacacaaccgttgaccccgcgggcggcaggctatccatggtcgaaaaaagacctgaaaaaattggatcagacggccgatcaagcctacgtggcaacggtcactgctcgttacaagccaggctttttaaacggtttaggtatgcatgttggcaacattgctgaccgtttctcgattttacgggtaccaaatgatacgtttgtggaaattgatcccgtcaaggattaaattcagtcaaagttagccaaacgaccttctcgaaagtgagaaggtcgtttttgttgcatggttatttttgccagatggcgtgtaagctgttcgaaggctcatggtatcatgagagcaacaattgcaaattttgacagcgcgactcgattcgatgaatgcgtcaaaacgcgtcaaaggaggttcacatgcacaaatatctttggtggctcatcccgcttgtcttgctacttggtattggggcagcaacgcaacagtcggttcaagcggcttcgggaacatggtatcgcgatgacggtgacatgatgggagctaagagccaggcggcggtcaatcgtttgaataatgagacgtttgccaaggtaaagggtcatcctcaacttgcagtcatcacggtcaagtcgcttgataatgacgaaatcgaagactatgccaatgatcagtttgctaaattgggtattggcaaaaaaggttgggacaacggcctgcttcttgtgctttcccgcgaagaccgtaagtattggctagaggtcggctatgggttagaagacgtcgtgccagacgggagtgcagacgagattgttacttcgaacgtgaaaacacagctgaaggcgcagaactacgatgaggcaatcgcgctgtttctcgatcatattggtcaacgcgtgacagcaaaccaaagtgccatcgcgacgcctgcccaaataactgctaaacgggcacgtgatgctgctattcagcaggcaatcttgattgctgctttgattttgatggccttgctggtactcttcttcgtagtccacatggcgatggctgcccgattgcgtgatgctatgcgtgataccgttgcgttggaggcgatgccgttgtatgcggctgtgatggcagcaggcattccgctacgccgacagacagcttccttaccactattcaaatttgcttggtcacatgccaagctacgcgaaatcggtctggccaatttggctcgtcgtggtttcgagtcgtggacgcgcgtgctgcggttgaccgcaccatatccttattggtactactaccaaacaagcaaaccactgcggcaattagccgatcaagatgtggtggcggccccatctatttcagcattagcagcgttattaacgcccgcattagctgatcgttttgcaaaaggcagaccttatgaagccagttatgcccagtggttaggccaacaaaagaatgttgctggtcaagctgcggtgacaacttggtcgaaatttcttgaaaatgttaaagaaacggatcgtttttcagctgaaatgttggctgccacgtttggcgttatcttgttccatattcggcatccagaaaaaaatcaggatttaagtcaatacgacttgccactttgggttgtatccgactttgggtcgagtgccagcagcggtagcagcggcggttctgacaatttcggtagtggatttggcggtggcagcagtggcggtggtggatttggcggcagttggtaagcaacgggaatgatattgagggcttgaaaccttgttaccacgtgggctaaccttagaaaataaaacaaattgatggcgatgttttcggtgccatcctaaaatgctggaaaacgaggctagataaatggaacaaatgataatgttaatggtcaccggtttacttggcggtattctcggtgccgtgcttggcatcggcggtgggatgattattacaccgattttgacgatgttgatggggttgccaattcaatatgccatcggtgcaagtattgtatcggttatcgctaccagctcaggtgccaccattgcttacttaaaagatgagatgctaaacttgcgcgttgcgatgtttctagaaattgcgaccaccgttggcgcagttattggtgccgttgtcactggtcttgtggacggcaaagtcttatacgtcttgttcggcgccttgctgattttttctgcattcaacatgatccgtaaaatgcggatgaaggagcctgaagagcgccagtcaaaaccagatgagattgcgactaaactacgattgaatggcgcgtattttgacaaagcgactggtaaagaaatcaattatactgtgacaaatgtgccaggcggatttgctatgatgttcggggctggcattgcctctgggttgttaggcattggcagcggtgcttttaaagtgattgctatggatacgatcatgcatatgccgctaaagccatcaagtgccacgagtaatctgatgatgggggttacggcagcagcaagtgcgacagtgtactattttggcggacaattgcagccgcaaatcgcggcaccgctcgctatcggtattttgattggggcaaccgttggctcacgcatcatgccgatgctgccaacaaaagttttacgtctgatttttattcctgttattggctacatgggtattcagatggcacttaaaggattcggggtgaacatctgatggacaaaaaactcaaaactgaaattgatgacgttgaaatcatgatcggtaaggtcatgcaaattggggtcgttttgtcggccttggtgattattcttggcctgcttttattgttagtcactggctcaacgggatacgcgaccggcgttcatccaacacgtgttggtgatattttatctggcacgctggcactaaagccgtatgcggttttgatgacgggcatcttcttgctgatcctgacaccggtgttgcgagtggtcgtttcgatttacgcttttgcagttgaacacgatcggttatatgtatggattacgacgattgttttgattatcttgctgggtgcgatgacaattggctacttgggtaatcggtagctcatgagttagctattctgagccggcaaacgaaaagcgccgatgcaaactttaatgagtttgcatcggcgcttttcagtggcatcattatttgccgcttggcttatgttccatgtaatccttcagtgtggcgacgacggaagaatccggcatctcacgcatggatttaatattgtggatatgttcaactgatacgtggctgtttagcgccatctctgtgtctgttagatgatttttgcgctggaagtcaataatctcccgtgaaaatgcactgatttgatctttttcagccaaaacgattcctcctcgtgagcctttactaacagtataacgatttttaccagtctgcgcacgtatgacattcaatcgtaacgttgtcagactgagttgcttgattaaagcggtaaaacaaacttctaatggccaatttcaaagcgacagtaaacaaagctattgcatttacgaacgtatgtttgtataatgaggttgtaccaaaggttaacaccatgttgttcttgatccggtattaaccagatcaaccattagtaccaccgccgatccggactggcctgccaccatcgcacgggatgcttaagcagtgggtaatgatgctggtgcttgtccatgacgaaggtctgatctgcttttgtgataatctgtgcctgtcctgatatgagttgatggaaaagctgccgtttgcgaatgcggtggacaatatgcatgacaatgcctgcgatgacacaccaataactgataacaatcagtagcatccaaccggtttcggcgaagttcaaagatgtcagtaactgccaggtttgcaagatgggatcaagtaataatagcttgccaatataacttagcaaagcgagcaacatacttggttttgataccagcagcagtgcagttaacccgatgaagtaaatggcccaaaacacatatggggcaattgctagcaagtagataaaatgaatgatggcagatggtcgcccaaagcgcagtgagcgccggaatttaggccatgaatattgtttagtttcggaattcgtcatattgccccctagcgccattagcgcattggttgtatcaagttttttggatcattgcctctagtttagcatagacacctaggcgatgatgcttcgtcgtttgcttgacgcaaagacactgttagcttgctgtcttttgttgaaaggtaaggtgagcttatggaacactatgcttatctacaggacttggcagctgatcaaaatgatcggcaattgcgagttcgaatttgggacaataagaatatcatcattcggcgtaatttgggtcagcagcaaggcttagccacacaagtctgggatgcttggctgcgtcaagagttacgacgatttaatggttttgaaccgattatcgaaattgatgatttttcgggtcatcaggaaattcggttttttaaggaaaatgagttggcagatgccgttcatttcatcttgcaaggtgaaggtactgttgaaactgccagttgaacgtttttgtagtggcaacgtcgtgagcattcatggaacttgcccgctgtgaaagctgaattttttaagcatgtgcatgaaaaaacaacttttcgtgtccatgctttttttgaaagcttttacaaccctgatgttatcagtatactgaaggtaatgaggtgaggacgatgaaggcaatcattttatatgcatcgattacaggcaatgccaaaggaatggcacggatcgagcagcagttctttgaacattatggttgggacgtgacccttggtgaaatgattcaaaccgacccaacaactatcaaggattacgatgtattggttttggccacttatacatggactggcggcgttattccggaagaaaccgaagacttttacgaggatctcagcaagcttgatttttctgctaagccgttggtatttggtgtgcttggcacaggcgatccgtattatggtaaagattacaataccgcgccagagttgtttgaagccgtgttggcggcaagtggggcggttcaaggagctgaccctgtgaaaattgccttaaatgtcaagcaagaggagatgccccagtttgcagcatttaccaaaagcctgatagccaaggctgaggcgcttcaagctgataagtgagacgatgttgacgtggtataatgaagccagaaagcgaggggatcttcatgagcgaagaaattgttttcttcaaccccggcgatgcagtcgccaatgattttgatttcgccgcggctcgacgcagtgcccaaatttacaaagccgaacatgttgtcgatgaaggcttggttgtcgctaaagataaagacggcaagtattccgttttttacgaagctgccggaacgcctgattcaaaggctaaaggtgactataaagcagttggcaagtatacgattctggctcatctatgacgaaaacggcgtggtaccgtattgtcttggtgctcattgccgttggcttaattggcgttcttgatcttgtcatgactcaaaatcagatcgccaatccttttttggttggcggtcttggtttaacacttggcattgtgttagctttgttagtcgcaagcatttggcaaccgcggaactcgcgtaagccttgattaaatgaaatggtatttcatccaaaaagacgcctgttaccacacgcattgtgtgtgacgacaggcgcttttttttatggttagtcaaactccagcactgattaggcattgacgatgtactcaggctgcttaccagctagaatggctagtgtattgtcagtcacgattttggccatggcatcccgcgcttcgacggtggcgtttccgatgtgtggcgtcaggaccacattatcaagcgccttgagacctgaactgacatgcggttcagcctcatagacatctaacgcggcacctgctaacttgtgagcctgcaattgctgaagcaaggcggtttcatcaattaacgggccgcgagctgcattgatcaggtaggcagtcggcttcatagtggccattgcctgcgcgtccagcaaatgatgcgtagctggtactagcggcaagtgtaaggtcacgatgtcgctttcacgtaacaaggtagcctgatcggtgaaggttgcgcctagtgtttgctctgtggccgatgtcagttgatggcgctgggtatacagaatttttgcgtcaaaagcatgcacgcgtttggcaacggcctgaccgatttggcccatcccgataatcccgacggttttgccagccagttcgtgaccaagaaaaaaggtgggtgcccagccggcaaaaccagcgccgcgcattagccgatcaccttccgtgacccggtgtaagaccgccagaattaaggccaccgtgacttcggcagtcgaagtggtcgatacttttggcgtattggttacaagcacaccctgggccttggctgcagtgacatcaatgttgttgaaaccggcaccataattagcgatcagtttcagatgtggggcctttgccaaggttgccgccgttactggtgtggacaaggcggtgatcaacacctcagtatgagccaagtgtgtttgtaagtcgctttcggtgattaaactactgccggtatatgcttcaaaatccacgccagctttttgcaaggcagcattcgccgatttcggcaatgccgcagaaatataaacttttgccatggatcattttccctccttaaccttgttgatcagtcttaacgtctgcacaatcactatgggtgtgcggttagcatcatcatggcggattgcgttacaagttcccgaactgatacttttaagagcctaacttaagtgtagtacaggttagacaaaaagaaagaaatcacatcggaagttttgtcttcttagaaatccaatcatggttaagccgttgcctaaaaccatatttctagatatacacgctcccgttcaccagcccagaaacatacgtgtaaggatcttgaaaaaacggtcatcacgcccaaggccgcttacactccggtttctaagcgcgactgctcacgctctgatataaaaatatgacgaatcgtggctgattgtgttacactctttctgttaacaaaaagtaagtaaaaggggattgatcatttatggcaactttgacacaagatatgaaagacatgatcggcgcacaattgaactatttggctactgccgatgaaaatggtaatccacaagtgggtcccaaaggcacgatgcgtgtcttcgatgatcatcacctgatttacaacgaagagacaggtaagcaggcatggcataatttgcagtattctaagaaggctgcggttgcgacggttgattacaaggcactcaagggttttcgttttgaagggaccgttgaattccatcatgatgacaagatctttgaagatgctcaggcattcgcgaaggcacatcatctgccagcagccatcagtgccgttttgattaatgttgatcgtatctataaactggatgccggtcctaatgctggcgatttgattgaaggttgatgggctgattcccggattttaacgcggaaaacgagcagctcatgatgccatgatttttaattaaacaatttatatgcctataactttgcaaatatgcatggttataggcattttttgtatacccagtaaaatactaattgttatcattagcatatttattgcttcgaataacctcgtttcgttaagcttaggatagtcagaagaaagtcaaccaaaagaaagggtgagaaccatgatgcattttatttggacactgatcatcggtgcggtgattggttgtattggacagctgatcgttgggcgcgatatgccactcggctggcttggtaacattatcggcggcttagtcggtgcatggctcggcacggcactccttggtgactgggggccttcattggccggaatggccttgatcccagctattataggggccatcatcgtcgtcttccttgtttccctgttgctgggaaccacacggcgcaaggcataggaggccgatgaccatgagacccatcacaaaaatcatgcttggcatcattgccgttggcggtttattgcaaagtgttggtttcgggttattgctttggccaagccgtgagtttacgcgattttatctgcaacaagtcgtttggctgcggccaaccatgataggcctgactgggcttgtcgctttggttttcctcatcatgctattggtcgccattttcaggcggtcaaccgctcggtcgctgattctagctggtgaagatggtgatctgacgcttgataaaagtgcgatcgaaaacaccgtggccaaagcggttgttgcgcaacattttgccaaatcggtggcggtagctgttagcattcgcaagaagcaagtcgcacgaatgcggattgaagctttttccggtaatagcaaggatctgaaggcagaggccaagcaaatcgaagaaactgctcgccagaagttgcaggcctgtctcggtattcctgtgaagcatgtgcgggtgcatctcttgccagccacaaaggtcaaagcgaaaacggcccgtgtgatttaacgatgacaacactgggacaacaagcaaatggcattcaaagcggacactttccaaagatgttgatgcctttgacgacgtgcccagctagaaggagagatgacaatgcagcgaggaatgatcggtgctgtgatcgggatcgtgcttgccttcgcctggatgcgattcgggtttatgggtatgctgctggtcttgatcttcggcgcagcaggctggctgattgagcgttacctagtacccaattggcatgcatttaccagttggttgaccgccggcaaagatgctttcagtaaaggaaagtaggtgaacggatggacgcagttgcaacaccgccagtagcagcatcaccagctgttacacgagaaacattgatggccaatagtcgattgacgtttgaagataaagtgattgaaaaaatcgctgcgctttgtgctcgagagattgatggcttgctaggaatggacggaacgatgatggacaatctgaccgaaaccttttctagcggcgagaatatcaccaaaggcatctcagctgaagttggcgagaaacaagtagcgattgatatggatgtgtttctggcatttgacagtgatgcgcaagctatttttaaacaactctgcgaaaaaatcagtgctcagattacccggatgacgggcctacagctagttgaactcaatctgcatgtcaaagatgtactgactaaacgcgagtggcaaaaaaaatgatgttgaaccttcataagacaaaggagagataaacatggacaacacgaaaaacgctggcatcaataaggaattgaaattcgatgacgctgtcattgcaaaaattgtgggcatcacttgcaatgaagtcgaaggcgtatactcgcttgaaggcggcatgatggcaaatatgaccgatcttttccgcaaagatgaagatccgactaaaggtgtggatgtagacctgagcgatgatcagaatgtttctgtgtcacttgatgccaccgttcgatatggtgaaaatgcaccggaaattttcaacaaagttacgatggcaatcgtcaagaatgtccgccaaatgaccggacttaatgtcactgaggtgaagatgaccgttaaggatatgctcaccaaagacgaaattgctcgtaacgaggctaagaacaaagatgctgacaaagaaaaggatcttcagccagcataatcgtgatataaattgccagttcagtcgttgaactggctttttttgtgagcgcgaggcagcccggttagagaccggagtgtaagcgaccttgggtgtgatggtcgggttttgaccattgcgaccaaggttcttatatgcaggtttctggggtggcgagcgcgttaaaatgagcgcgaggcagctcggttaggaaactagtgacgcacaagttatttttatagtttgcacgattgataatcccccttaagggtctgtactagaatttcggacagaaacataagagaattgatttatccgaaaggagtcctcaaaatgacctattcacgcaatcgctacgaccaagattttaagaaaaatgcggtacgtttgagttttaactcttccaaaccagttaaaatcattgcctccgaacttggtgttcctgaaagtgccctgtatcgttggcggaagctatataccgaagatggaaagcaaacgccgcttgcttctttagaagctgagaaccgtgccttaaaacgtgaaaatgccgaattagcattggagcgtgatatgttaaaaaaagccgctgcctactttgccagtctccagaagtaacccccagcgataagtatgcttttatgttgagggaaacctctgtttctgtggtaaggtgggcgcgtttgttagacgtatcaacgagtggttattatgcttggcggagagctttgccaaagcgaaacgccaaagaaaggcaatatcgtcaacgaatcaaacacttttttgatcaaggacagggcacttacgggcccaaacgcatctgcggtttattgcgtaaaaatggtaataaagcttcctatcaccgagttgcccgtctgatggctgatggcggtctgtattcaacgctacgttgtcgtcatccgaagagtttgaccgatagccgccttgctcgtcaaggtgattatcccaatctagtgaaacaccaatcttttaagccgtttgaagccttatcaagtgacattacacagacgacaacatcagaaggaaaagcttacatttgccaaataagggatttgaacagcaacctagtgttagctcatcaaatatccaatcatatggacacggatttagtcttagcgacacttaaacaagcccaccaaaggtgggctttgccagaaacgtgtatttttcatagtgaccgtggtagccaatacacggccaaagcagtgacaaagttggtcaaccaatatcattggcaacgtagcttctcagcattgggaaaaccgggtgataacgcttggagcgaaagcttctttgccatcatgaagaaagagctcatttatcagatacaatttaaagatatcaatgatctgagagcgcaagtcttcgcttacatcgagaccttttacaaccgcgtaagggtacaagcacgcttagactatcttgcaccagtagcatggctttccttgtatgaccaagcttcacaaaaagtcgcttagcaaactgtccgaaaaagtgttgacttccctaacgaattgacgctgtcaacaacaacacgtaaactgctttcatagaacaaagggggatcctacatggaatacttaaaattacttggcattgtcattatcgttgtcgggtttgcattgaagtgggacacgacagcggtagtggttttggcagcagttgtgatagcagttttttcgggcatgagcatcccggctttgctgaccacacttgggcagagctttgtcgataatcgcatggtgtcgttattttttctgaccctgccgatgattgggttagtggaaagccacggtctcaaggaagttgccgtcaatggcattcagaagctaaagaaattgacacccagtcgtattttgaatatttatcttgtgattcgcgagttaggtggtgtctttggtatctcgttatctggtcaagtgcagttcgtacgaccgttgatcacgccgatggtaacggcggcggctgaaaccaaacgtaagctaacagataaagatatcgaccttattaaggcgcgttctgcggcgactgacaactttggcaatttctttgcgcagaacctgtttgttgcaacagcgggtgtcttgttgatcgcgagcacgatgaagagcctcaatcatccagttgagccgatgcaggtcgttttagcatccattccagtggcattgatcacgttggtcattgtggctatctacaatcgctggtttgatcgccaatttgaacagcagtcgcataagggaggcaaatgatcatggtcaatacccttttattgatcctttatgctctgattggcgtcgtgatggcgattgctggtattgaggcgtttcgcgcaaaagataatccggcacgtatcggaaccggtttgttttgggagatcatggcagtgatttttgcctttgggaccttgatgcccgcgatggtcgttggtgttctagttgttattatcggtattttggcgttgttcaagcagattcagataggcaaaattaagcccgttgacggcgcacacgcggcaacagcggccaaacggcttggcggttgggtattcgtcccaagcgtggtacttgcagtcgtttccatcggtgtcgcccagtttaccaaactcggtggtcaggtcggcattggcattggtgcggcggtttcgttaattgtggctatcatcatgacgaaggcgccaggcaaaatggtttataatgatacccagcggatggttcggtcagttggtgctgctggcattttgccgcaattactagcaaccttaggggcagtttttactgctgctggggtcggatcactcacggcgaaattgattgccggcttattcccaactggaagtcatcttggcggcgtgattctatactgtgtggcgatggcgctctttacgattattatggggaatgcctttgctgcgtttgccgtgattacagcagccgttggcattccttttgtcattgcgcaaggcgctaatccggcgattgtggcggctattggcatgacctctggctactgtgggaccttgctcacgccaatggcggcgaacttcaatagtttgccagtcgcgttgctcgaaatgaaggatccacttggtgttatcaaacagcaggcgccaattgcgatactattgttgatcattcaaatcggcctcatgtacttcttggcattttagaaaggaaatcttctcatgaaaattcttgttaccggatttgatccctttggcgacgataaaattaatcctgcgattgaagccgtgaaacgtttgccggatgaaattgccggggcacaaatcgttaaattggaaattccgacaaagtttaatgtttcagccgatgtcgttaaagatgctattgccaaagaaaagcctgactatgtgttgagcataggtcaggctggtggccggtttgaactcacgccggagcgagttgcgattaacttggatgacggtcggattcaagataatgccgggtatcagccacttaatcacacgattcatggcgatggcgagaatgcctactttacccagttaccgattaaggccatggccaaagccattcgggaagctggtgttccggcagcagtctccaacacagcaggcacttacgtctgcaaccacattttttatcaggtacagtatatgcgggataagatgtttcccgatattaaggcgggcttcatgcatattccatttttgccggaacaggttgtcactcgtccggaaacaccagcgttgtcattggatgatgatgttttaggcatcactgccgctattaaggccatcgtcgcccgtgacggcaaaggcgatatcgaaacgattgaaggcaagaatcactagatagttgtggatcattttttatttgaactgccgcagaccgcatgacgggtgtgcggctttttgagtgggctagaatgcttgctggccggtatttaaagaagcaaggcggtataatgaaggtgtgatctcaatagagagggtgattagatgactatcggtattattggatcaggtaatgtcggccgggcattaggccaactgtttagtcatgttggtgagcaggtgattatttcacatcggcatggcgtggcatcattggcaccggtcattgcagagatgcgctcgacggtcgaagctgggaccgttgctgacgcggctaaacaagacattgtcgtgctggccgtgccatttaatgcgttgccggaattgccgacaagcgtggatccgaagacgattattattgatgcgactaactattatcctagccgcgatggcgaccagccagcactggcagcacatcaagtcacgtcatcagaactcgttgctaaacattttggcacgaaaaaagtggtcaaggcattcaatacaattgcgatgactaaaattcgtagtcttgccaagccaagtcagccagcaggaagaattgccattccgattgccggggatgataatgccgctaagcagacggtcacgacattgatcaaacgaattgggtttgatgttgtcgatctcggcagtctatcagatagctatccagcacaggcggatggaccgttgttcttatttgctggcgatgctgatcagattcgtgctcaagtgcaacactaaagggttaactgggcgccaaagctatatgaaattcgtataaaaagagcattgcccgtatactgcggcaatgctcttttaattatgcaggctgacccatccgtgccttgtgacttttcacaatcatattggcgatcgccttagcaatattttgatttttcaaaatgggaccatgggagtagctgccaatggtatttttataacgcataccttcgacaccgtcttcagggttatttccgtaaccttcaatcattttgcccaacggtttgagcttttgcttgtcgtcaaaataagtccggccactgtgattctcaaatgcggtaactgtcccgaactcggtttcgtacttggtatcaccgatcatgcgactgtctggcttgaaaactgtgtgcagcggcaaaatgccgaggcctttgatgactgatccttcgctagttttgtaataatcgccaagcagctggtaaccgccacagattgccagcatcggtttaccattttcgatataccggccaagtgtttgggcatggcgcaataagtctttggctaccacggtttgttcatagtcctgaccaccgccgaagaagataaaatcatagtcgtccgcattaaaatgatcgccaagactgacattatcgacatcgacttggtaaccttgttgatttaataaataacgtagaattttgacatcgccactgtcgccatatgtgttcatgaggtcttcataaagataagcgattttaattttatccgccattagccgggtccctccgtttgtttgactggcaacagcttaccacaagtgttggctgagaggaaagaaagtgcatagtgcggttttaattaaaaaaactcgaaacaggataagtgtttcgagttagtctggttattaacgtttgtgagccttaatccacggttgggctttttcctcaattgccttgtgaagagcatccatatccgcgtagtcactaatttcgaagacaaattcatctggttgatcatggaaggttggcttgttgtttaacgtgatggtcaactggtcaaattgattatcgccagtatctttacgaatttgataagtgaaaaaggcagcttcatagttttgactattgtcaggttcctcgtacaaaacttccatgaattgatgttcagttcggtagttgtctttttttaacttatcccacaaagcctcatactgtttgtgcaaatcggccagctgggcatcggtcagttgttcattttctttgatttctttaccgtctaattccatttttctcgcctctgagtttagttaccatttcattatcgaactgtgaacgcgtttttgcaagatgacaagggtccgttcagacaaatcttgtggtgggtaattaggtgagtaacgcgaccgcagccagcccagatagcgaatcttgatttgagcaggaaggcataacaggtgtgtcaaaaaacttgcgcttaacgcctgttctttccatataaagacggttgagcagaggccgcttttacgttacacttgacgggtacgtgaaaccctgtttgttccacaaaatcaagtttacgaaaatggaggcaggcatggatccagcagcttttgtccaagccttggctgatcacgggatcgttttaaacgatcaccaacaggatcagtttgcggcatactatcagtatctgatcagtgagaatgaaaaaatgaatctgactggcattacagctgaaggggacgtctacctcaaacacttctacgattcactaacgcttgcgttggtgctacctgagcttcagacacaagtaatgtcagtttgtgatgtgggtgctggggcaggtttcccatcaattccgttaaaaattgcgttcccgcaactcaaaatcaccatcgtggattctttacaaaagcgaattggctttctcgaacgattaacggcgcgtttggagctgacagatgttcagctctttcatgaccgcgccgaaacttttggtgccaaaaaatcgccacaccgtgccagttttgatttggtcacggctcgtgcggttgcggcattggatgtcttggctgagctctgtttgccactagtaaagccgcaaggtcgctttgtggccatgaaagccgcggcgacacccgcagaattaattgccgccaagtcagcgattggcttacttggcggcaaattggcccaagatgctgcgttgacgttgccggaaaccggcgattcacgtcatttgctggtcatcgacaaagttaaaccaacaccaaacaaatatccgcgcaagccggggataccgaataagcaacctttgggaggtgcataacgcgtgccattatcatccatttttggccataaaaagcctgacgacgaaacggttgttcaacaactgccaatgaccgcaatcgtgcctaaccaattccagccgcgcaaagtctttacgccggaatcgattcgggagctagcaacgacgattaaggatcatggcttgttgcagccgattattgtccgtgaatataaaccggagaagtacgaaatcatcgcgggtgagcgccgatatcgcgcgatgcaaaccctgggctgggaaaaagcgccagccattgtgcagaaaatggacgacgacgaaagtgcatccatggcactagttgaaaatttgcagcgcgaaggcttgagtgcgattgaagaaggccaagcttatgtggcacttatgaaactcaatcacctgacacaagccgctttggccgagcaactcggtaaaagtcaggcatttgtcgccaacaaaatccgtttattgaaactaagcgagccagttcaagaagctttaatgaagtcgcgtatcagtgaacggcatggtcgtgaactactgaagttagacgagaagcaacaggttaccgccttacagcagatttttgcagacgatctgaccgttaaagaaaccagtgcccttatcaatgagatgttgcggcctaagaagccaaccccaaaaccgaaacctaaagttcgacgatccgcggtgagccatgatacgcgcattgcttggaacacattaaaacgttcggttaaaatgatccgggaaaccggtatgacggtcacagcaaaagaagaagatactgacgacgcttaccgaatgatcatcgagattccgaaagaaaagagataggaggagctcatggcacatatcatcgcagtcgctaaccaaaaaggcggcgttggcaaaaccaccaccacggtcaatctgggcgcctgtttggccaaccttggcaagaagattttgattgtggacgctgatgcacaaggcaatgcgactagtggcgtcggcgttcaaaaggcccaagttgaaaaggatatttatgatgtgctagtcaacgaagagccgattaccgaagccattctgccaacgaaacataagaacatgtcgattgtgccagccaccattcaactggctggcgccgagatcgagttaaccagccaaatggcgcgtgaaatgcgattgaagttgggattgcatcctgtggaggatcaatacgattatattttgattgattgcccgccatcgcttggccaattgtcgatcaatgcatttacagcaagcgactcgattttaatcccggtccaaagcgaatattacgctttggagggcttaagccagttactaaacacggtgcggttggttcagaaacactttaatccgagcttagcgatcgaaggggtgttgttgacaatgtatgatgcgcggaccaatctcggcgcacaagtcattgacgaggtccgcaagtattttggcgataaagtatatgcaacggtgattccgcggattacgcgattggcggaggcgccaagctatggtctgccaattgtggattttgatccaaagtcccggggatcagaggtttacgaggctttagccaaggaggtgctggctgctcatggcgaataagaataacaaaggcttaggccgtggtatcgatgcgattttcaaagattttgagagtccagatctgagtgccaataatacagttgaagaattaccgctgattgacatccgaccaaatccctaccaaccgcgtaaaacgtttgatgaagaaggcttgaaggaactggctggttcgatcaaacaaaccggcgtgttccaaccgatcattgtccgcaagagtgtttcaggctatgagattattaccggtgaacgtcgcttccgtgcgtctaaattggctggcaaggagactattccatccattgttcgggacttcaatgatcccgaaatgatggaaatcgctgtgctggaaaacttgcagcgggaagatctgacgccgctagacgaagcccaggcttatgacaccttgatcaagcgtctgaatctgacgcaagcagaagtatcggcacgacttggcaaaagccgaccttatattgcgaactacttacgccttttgacactgccgcagcaagtcaaacaaatgttaagtgccaatcagctgtcaatgggacaggcacggacgctgttaagtctcaaagataagtccaaaatggtgagtgtggccaagaagacaatcaatgagaacctgactgtgcgccagctagaacggctcattaatcagatgaatgctggcaacacgcgcccggcaaccaaagaaaagccaaagtcgccatacgtgcgggcaactgagaaccaacttggcgaacgctttggcaccaaggtgaatattaatgaaggcaacaaaggcaaaggcaagatcgagattgacttcacttccgaaaaagatttgaatcggatcttggccatgctcgacgtcaatattgactaactagcagagcgtgagcggcccgtttagaaaccggagtgtaagcggccttggacgtgatggccgggtttttggccattgcgtccaaggtccttacacgcaggtttctgggccagcgaacgcgtttaatccggtccgacaagcacaacaacgctggaggtggacaaatgtatgatttacatgatctcgttcagatgaagaaaccgcatgcttgcggtaccaacaaatgggaaattatccgcttaggtgctgatatcaagatcaaatgtaccggatgcggtcatattgtgatgatgtcccggcgcgattttgaaaaacgactcaaaaaagtgttgggtcatgtagagtagacagactaaatagaaagtgtgaagtaaccaaatggctttaacagcaggtatcgtaggacttccaaacgtcggtaagtccacgctttttaacgcaatcactaaagcaggcgccgagatggcgaactatccattcgctacaatcgacccgaatgtcgggatggtcgaagtgccagataaacgtctggcacgaatcgatgaattgattccggccaagaagattattcatacaacttttgaattcacagatattgccggcattgttaaaggtgcttctaagggtgaaggactcggcaacaagttccttgaaaacattcgtcaggtggatgcgattgttcatgttgtccgagcgttcgatgatgacaacatcaccagtgtaactggcaaagtcgacccgttagaggatatggcaacgattaatatggaattggccatcgctgatcttgatgctgtcaataaacgctatgctaaagttgaaaaagtggcgcgaacacaaaccaatgacaaagaagcgcaggctgaattcaaggtgctcaaaaagattaagcccgtactggaagatggcgggatggttcgcagcatcgactttgataaagatgagctgaagattgtcaaaggcttattcttgctgaccagcaagccagttttgtatgtcgctaacattgctgaagaagcgatggctgatccggattcggttgattacgtcaagcaaatcaaggccgaggctgccaaagaaggtgccgaagtgattgcgatttctgccaaaactgaagaagaaattgctgaactggatgacgatgaaaaggcagactttttggcagcagaaggtgtcgacgagtctgggttggataagctgatcaaggctagctatcatttgctgggattggcaaccttcttcacagccggtggcaaagaaacccgtgcgtggacatttagacagggaatgaaggctccagaagttgctgggattattcattccgacttcgaacgcggttttattcgcgccgagacaatgtccttcaccgatttagacaagtacggatctgttcaggcggttaaagaagcaggccgttatcgatctgaaggcaaagaatatgaagtgcaggatggggacatcattgaattccggttcaatgtctaacgcataacgacttaggagataggagtttccaatggcagagaaacatgaagcagagacgaaacagacggcaaccgatgctgcagtaaatggtaaaaatactgctacgactgaacaaacagcatcaaaagtacagtcggcagccactgatgagtcgtcagcagatcaagcaacggcggctaaaaatgcacatgtgaaacaggaaaagcctgcgaccactgtgccagagctgattgcacggctcacaaataaaaatgatgaatatattttcaaactacgccgtgagttaaaagacggcggtatgaacgcggcggacgaagaagaactactcaaaacgatgttgcccgagatcatcacagcgcaacgacaaggcaagccagccaatcagctctacggaccggttacggtaaaggcagacgaaattctgcatacgccaaaacctgagcctaaaaagccaatgtggttgatggtcattgaccaaagtctgttcttcatgtcgattttagcggttatgtatggggcacttgcctacttcgataccaagtcgcaaaatgccgccagcagcagttttgtttacttagtgatgttgagtctaatggctggtctcttcttcgtttattatgctgactggatgcagcaagataaaaagaaacgccgcagtgcttggcttgtcttgggcggcggtgttgtcttagtcgtgtcgatcacgttcattggcagtgccttggcgatgcttgacacgccgttcacgcgcccaatgccgtggttcgtcaatatcattattggcgccattgcctatgggattcactgggtcttacagcaccggtatcacctcaaaagctttttccagagataagctgatagtccgatttcaacatcgggtatctactttttaaaaaatccaacagtcgccgaaaatggcggcttttttgtattgccagtgagggaaaacggcaaatgttcttgtcattttacatgcgaaggttttagcgggtaaaaaacgaatgatattaaatgacgcgtcacaacacacgacaaaagccgaacattattttgagaaagctatagctgataaaattttgttcggttccatatgaacgattatgagactttctttcatttttaagcctatgataccggcgtttcgaaaaaaatggttagacttgtttgacgtgcctaaattccggtagtacattagtcaacaactaaaaattgaaagagggattacgctatgagtctttgggatacaaagtttgcccggcgcggttttacgtttgatgatgtgttgttgatacctgcagaaagtcatgttttacctcacgatgtcgatctgtctgtacaactggcggacaacttgaagctgaatatcccaatcatctcggcggggatggataccgttaccgagagtgctatggcaattgcaatggcacgccaaggcgggttgggcgtgattcataagaacatgagcatcgaagcacaagcagatgaagtgctgaaggtgaagcgcagtgaaaatggtgtcattgtcgatccattcttcctgacggccgataaaccggttagtgatgctgaagatttaatgaaaaaatatcggattagcggcgtcccaattgttaataacaccacagatcgcaagttgagcggcatcatcaccaaccgtgatctgcgttatgttgatgataaaagtgtgctgattgacacggttatgaccaaggaagggcttgtgaccgcgccggctggcacttcaatcgaagatgccgaagctattttacagtctcgtaaaattgaaaaattaccgttgatcgataaggaaggccgccttagtgggctgattacgatcaaggatattgaaaaagtggttgaattcccgcatgctgctaaagatgcgcatggccgtttgttggttgcagcagcggttggcgttacctctgacacctttgatcgggcacaagctttgcttgatgccggtgccgatgcgattgtgatcgacacggcccatgggcatagtgctggcgtgattcggaaaatcaaagagattcgggaacagttcccattagcaactctgattgccggtaatgtggccacggctgaagcaacggaagcgttgtatgatgctggtgtcgatgttgtcaaagttggcattggccccggttcaatctgcacaacccggatcgttgccggtgtcggtgtgccacaactgactgccatctatgatgccgccagtgttgcccgtaagcgcggcaagacaattattgctgacggtgggatcaagtattccggtgatatcgtaaaggctttggcagctggcggcaatgccgttatgctcggttcccttttggccggcactgatgaggcacctggccagttcgaaatttatcaaggccgccgcttcaagacttatcgcggcatgggttcacttggcgcgatggcgcaggcccacggttctagtgatcgttatttccagagcggggttaacgaagcaaacaaactggttcctgaaggcatcgaaggccgcgtggcttacaagggcagtctcggcgatgtgattttccaaatgctcggtggtattgaatccggcatgggttatgtcggtgcaccgaatcttcaagaactccaagataatgcgcagttcattcaaattaccggtgctggtttacgcgagagccatccgcatgatgtgcagatcacgcgggaagcacctaactattccgttcaataaaagattggtatcacaaaaaggctcatactgccattggttgcagtgcgggccttttttggcgaacgcgctatgattaagaggctacattcgtgcccgatgaatcacgtcaagtagttccgtaccgaaagttgtggccaatgtcaatggccaaccgggattggtgggtacagttgtcagaatggtttgcagccattgtgcagttggcaaaagtttcactaactgatgactggagaattgcgtgaatagcaaattagcactataaaaatcaatcagactttgttgcaacttggcatcatggacaggtagcaataagtcattactattgttacgatcacccaagaaaagcggtaacggcgcaaaatcttgttgtaaactaaaaggggtcattttatgagtcgtggccatctcgggggtcaggcgcagcatgaagaccagtttacgcgacgctgtccacagcagcatgttggcaagggccgtgtcaattgctgtaaaggtatatgtgtttttggccgcggcaggactcgctaaggcttttgtcaacatggttatcgagtcgtggcgggctgatgatgctggtaagacaacctgtagctgacgaacacctcgtaaccaatggggatgtgtggcaaggcgtaaggtgagccattgggaggattgccttaatagccagtaagtacttccgcttgagcgggcaatgttaatgccagcgatgtgcatggttgagggtaaacttgctgtgaccatttttgtcaaatctttcaattagccgccttctttcgcgattaaatcaacacttttgtacctattctagccctgttttcttaggcttttcgtaaagaattccccggtcaactttggtacaatggactttgatgtaacagaccctacagttcttctcataaacggagccaatacaatgaaaattttaattgttgacgacgataaagaaatcgtcgaattactaagtatttacgttaaaaacgaaggttacgaaccgattcaggcgtattcaggtaaggaagccattactaagcttgtgaccaatcctgatattgctttgatgatcctcgatattatgatgcctaatatgtctgggatggatgttgtcaaagaagtccgcaaagattcacagattccaatcattatcgtctcggctaaaacagcagatatggacaagattcaaggccttattactggagcagacgattatgtcaccaagccattcaatccgctagaggtcatggcgcgcgtcaaaagtttgttgcgccgaagtcaaaatgaggtgaccaatacggaaccggatgtgcttgaagtcggtccgctaacgatcaaaaaagatagtcatgaagtcaccacccttaccggcaagcaaattcagctaaccgcgctggaattcggcattctgtacttgctggctagccatccgaatcgtgttttctcggctgatgagatttttgaacgcgtttggcaacaggaatcaatcgtctcagcgaaaaccgttatggtgcatgtctcacatctgcgtgacaagattgaagaagcgaccgatggcgagaaggtgatcgaaacagtttggggcgtcggctataaggttgaggcctaacgatcatgagcgaaaaagtcaaactaactggtaaggaaaaatccgaactttggattgaaggcatcgtgacggtgattctgctgttaatgcttaattttgccttgctagtgttgattaatcagatgatcgcgcacaatcctggtttggaaaatgctatctggggtgtgaaaacgaatctgacgtttggcagccgtggatttcatttgtggagctggtccaatcttttcctagcactgatggcgattgctgatgtcattgtggtgtattggcgacttgctcggcgatatcggcaaatgcaaatgcgtcacgtcattgcggagctacattttattgccgatggtcatcttgatcatcggattaagtttgaggtcaatacggagttgcaaaaggttgtcagcagcattaacgcgcttgttgattcaaccgtcaattcaatggccgaggaacggcggatcgaacagagtaaagatgagctgattactaatgtcagccatgatattcgaacgccgctaacgtccattatcggttatcttggcctgattgaagatcatcaatatcgcagtgaagaagagctactcaagtacacgcacacggcttatttgaaggctaagcagatgaaggtactggttgaggacctttttgagtacaccaaggttaaatcaaccacgaccaagctgaatcccgtacgttttaacatgattgcgatgctagagcaactggcagctagttttgagctggaggcgcataagaagcatatgcggattctggtcagcggtgaacctgacccgttgatgatggaagctgataccgaaaaattaggccgggtgttcaacaatttaattgttaatgcacttaagtacggccaaggcgggcgtcatatttttcttgatgcacaacgtatcggtagtgaagtcgttgttaaggtctcaaatgatggcgcacaaattccgaatgatgctttgagtcagttgtttgatcgtttttatcgcgttgaggaaagccgatcgcaggaaactggcgggactggtcttgggttagcgattgcccaaagtatcatcgctttgcatggcgggtatatttatgccgattctagcccggagataacaagctttgtgattcatttaccattaaaagttggcgcttcgctgacagacaataaaaataaatctaatgaggaagcaggaaagtcaaaatgaagaagttgatgcgcgggttgattgccgcagtggtggcggtattaatgattgggggtgctgcgccagcaatgtcggtatctgcggcagagagcagcgataccaatctagttgacgccaaggcagcagtagccattgaaccgactactggcaagatattatatgctaagaatgccagcagtgttttaccaattgcatctatgaccaaaatgttgagcattgagctggtgcttgacgcaattaagtccggtaagatcaattgggatgacaaagtgacactgaataacgcaatctgggaactcagtcagaatcgtgaccttagtaatgtaccgttgcggcgcgatggctcttattcagtccgcgaactgtacgatgcttctttaatttattcggcgaatgcagcgatgatgttattagctgaaaaagtagcgggcagtcaggagaaatttgtcagtcagatgactgcaaaactcaatagctggggtatcaccgatgcaaaaattgtcaacgtgaccggtttgaataacagccaattgaaagatgctaaggtacccggtacagatgataacgcggagaacgaaatgtcagcaaaagatatggcccaggtggcacaacatttactgaaagatcatccagaagtccttaagaccacgagtattgctaaacagacattccgtaagggaaccagtgatgcgatcgatatggaaaattggaactggatgctcaagggcctagtgtcttatgataaggacctcccagttgatggcttgaagacaggtacttctgatgccgctggggattgttttacagggacggttgagaaaaatggcatgcgaattattacggttatcttgcatgcaaatggtgatgctaaaactcgccgttttgatcaaaccaaaaaattgatgaccaatgttttggaaaattggaaaacgatgacgttagctgaagctggtcaggggattaaagggtacgacagcgttaaggtcaatcgtggtcaatcacggacaacgccgattgcgccgtcaactaaggcggttgctgttgtgccatctaatagcagcaaacaatcacttcaatatacttacacgccagcaaaaggcgtgaagaagaatactgtcgaagcaccagtcaaaaaaggtaccacgattgcgcagctggaagttagcgccaaaggtgataaccttggctttgttggcagttcggcaagcgaaggcattaccttaaagaccaccaagaccgataacaaagcaaacttctttgtcctgatcttccgtggcattggcgatttcttcagcaatattttctagtccagcagttacctcattgatccaaaaacgaaaaagtggtgaatgtcctgaactccgaatggagatcatcacgttcaccttttttgcaacaagtagagagttagttttcagataaaaaagaaggcattgaaatggtcacctatcacgagatcacgccaacaggtttggctaacttgaagcaggaagttgaagaccttaaaactattcggcctgcaaagatcaagaacttggccgatgcggcagcgttgggggatcgctcggaaaatgcggaatatagcgctgctaagcgtgagttgcgccagctagaaggccgattgcgatatctggataaactcattcgttatgctaaagtcacgcacccggccgctagtgatattgccgatattggcaataggatcacacttaagttcgatgatgacgaggaccaagcgacttatgaacttgtcggccctgccgaagctgggatgggccaagacaagcttgccatcaattctccctcggcgccgctattcggcagcaccacgcaggcgataccgtcacggtgacagcgccaagcggttcgtatcaggtgacgttaatgaacattgcatctgcataaaaaaagataatcaatgaactttgagcatgaaccaagacggcacacagatagttgtgacagtccgactggtttaatgccactaccgcgcttatgctataatgaagcttgaattcacggcatataaaaaggagtagcagcccaatggcactatcacttagagcatgtatcttattattaaaggaacatcatctgctaaagagtgcagcaattcagaatactgaagatgtcgatatgaccggcatcgcctatgattcacgcaaggtctctggaccaacgctgtttttctgcaaaggcgacaagttccgaccaatttatctttccatggccaaggacaacggtgcgcgaacttatgttgccgagaaaccttacgttgaaggcaacggcttaaacgccttgatcgtgcggaatattactaaagcaatggcgattttgagcgctgctttctttgattatccgcaagatgatttgtttgtgatcgcttatacaggaaccaaggggaaaaccacggcttcctattttacagaagctattttaaatgaggctcgtccacgacacatcgcgcttttttctacaattgatacggttgttggccctgagtccgatcagcgtttcaagtctaatctgacaacgccagagagcctcgatcttttccgcgatatgcgcgaggctgtcgaaaacggtatgacccatctcgtgatggaagtgtcgagtcaggcatatttgcgcaatcgcgtttttggattgacgtatgacgtcggcttcttcctgaacattacgccagatcacatcggaccgaatgaacatccaacctttgctaattacttacacaacaagctgcaattgttggtcaatgcgcgcaaagtggtcattaatgccgaaaccgagcattttgaccaggtttatgctgccgcaacgaccaccacttatccagaaagcatctacctgtttgccagtgctggcttcagacctaaacgcgatgatatcgatattgattttcgctttgatagtcaggaagctgacgttgctgagagtcgtttcactttagtaccagtcacggaaaaagcagcagcattgaacatcggcggtcactactcgcttgctttgattggtgattttaacgaaagtaacgcgacggctgctattattggtgctggattggctggcgtggatgcatctgccgctgttccgggtattgcaaaagttaaaatccccggccgcatggagcatacgaaagttgccggacatggtgctgtctatgttgattatgcgcacaactacgctagtatgaaggcgttattgtcgtttttgaaacacgcttacaaggatcctcgattactggttgtggttggatcccccggtgataaaggtgtttctcgtcgtcccggatttgctaaggttctcactgagtttgcaactgaggcattcttgactaccgacgatcctgggtacgaagatccagcaaacatcattgaggaaatcgatagtaaaatcgatcatagcaaagttaaagtacacaaagtgcttgatcggcaaaaggccattgctgaagctattagcgacagcagaccaaatgatatcgtggtggtggctggcaaaggggccgacccctatcaaaaggtacgcggcgtcaacacaccatggccaacagacatggctgttgtaaagcaagtcgctaaatcgctacaggaaggctgatacgaatgcgtcaatttttcaccgttattggcggcatgggcacgccggcaaccgagagttatgtccgtttgttaaaccagcgtacccacgcgcacagcgatcaggaatatctgaattacattctggttaacgatgcgactgttcctgaccgtacggattacattttggatcatagcaagcctagcttttatccggatttgttggaagacattcaagatcaaagtttactcaatccggagttcatggtcattgtctgcaacacggctcattatttctatgaccaattagccgcagcgacaccgattccattgctacacatgccacatttagccatcagcgatatgtgtgagcgttttccagatgaaaagcgggtgggactgattgcgacccaagggacgatccaagacggcatttacagtcatgaaatcgaaactagcgggcgtgaagtcgttcttggcgatcaggcgctgcaagacatggtcactgagttgatttataaatacgtcaaggaaaagggcgaagtcaacgcggccctgtatcatcgtattcttcaacggatgcatgacgattttaatgtcaacgttattgtccttggctgtactgagctatcgtttgcacaggaaaaagccggtgatcatccgtatcatgtgattgatgcgcaaagcattattgttgataaaacaattgcgttaggcaaagctttccgtcaaagtgaagcagctggaaaggcattgttgaatcaaatgatggcgcgttaatagcgtgttaaaagaaggtgcttggttttgctagatgtcttagcaaccaagcattttttgaatgctaagaaagacgactgatcaggatatcgctatttttgactgatgcaagtgtgacgctgggctgctaacacattcaatcaactacttacttgtggtaagcttatagtagtacccagtaaaggagatgctcattttggcacatttaaccaaattgaccgacacatatacattaagtaatggtgttaagattccgatcgtcgggttcggcacttggcagacccctgatggcgacgttgccaagcatagtgtcgaagcggcattggctgcaggctatcgtcatattgacacggcggctgcttacggtaacgaagaaagcgttggtgcaggtttgcgcgcatccggcgtacctcgcgatcagatcttcttaaccactaagctttggaatggtgatcacggttacgaggcgactaaagcagcgctagataaatcactcaagaaactgggcgttgattatgtggatctatatttaattcattggccaaacccgattaagttccgtgataattgggaagaaactaatgcagggtcatggaaggccatggaagaagcctacaaagccggcaaagttcgagcaattggggtttcaaacttccgcgccaagcacattgacgctttgctaaaaacagctactgttaagccaatggttaaccagattttcttgaatccaagtgatttgcagccagaagttgtggggtataatgacgcccatgatattttaagtgaagcgtacagcccacttggcacaggcaaaattttccaagttgatgccttaaggaaaattgccgcacgctatcacaagagtgttgctcagatcgtcctccgctggtcattgcaacatggtttcttaccattgccaaaatccgttcatgacgatcggattaaggaaaacaccgagttgttcgattttgaactgagccatcatgatatgaccttgattgatgctttgcacggtgaagccggcttagcaactgacccagatacaacggatttctaaggcaagcgtctatataaggggattcagtgtaactgattgcttaatgatcaagtattcctgatgaacttataaataaaaaatgacttcattccaaattttggggaatgaagtcatttttgtttttattgtgtgtcatgtgaatgcagcaacagctgattgaggcgttcaactagatgaaaagcggggttatttatcggctgactcggaaacgatgctgcctgtttgtgcattaattagctgaacgtcattttcagcaagaaagtcgatatacttgggcgcaatgtcgccataggtgataatggcatcaatgtccttcaaagtaccataggtcagtaatgaaacacgatcaaacttagtgtgatcgattaacagtattttttgatgcgcttttttaaaaatctcagatttaatcaaatattcgttatattcagagtttgacagccctctagtaatagaaatgcctgttgctgccataaaggctttgccaatattaaagcgactgaaaatattcatattgtcaattcctgtaaaggactgggttcgtcgatcaaaattcatgccaataatgaccaacttaatattcccaaggggagcggctttattaatgatctctaaattgttagtgacgagtgtaaatgaaaactcggaaggtaaataggcgcccatttcagccgttgttgtaccagagtcaatgaaaatcaaatcgtctggttcgattaattgcgcagcggctcgaccaatttgacgtttttcggagggagcagaaagttgccgttcactatagatggttagcgcgttgggcttcgctctgttaaaggtagcagtgacaccgccgtatacttttttgacagtaccagcatcgattaagttagcaagatctctacggagtgtgctaggggctatagaaaatttgtcttcgagttccttcatggaagcagttctgacttcgttaatataatgctgcatcgcatcaattcgttcttttctaagcatggatgtcaccttcctttctaaacaattggtcaacctgattatagcataaggcggtcaacttaatgaccatattttgactaaaagaagaacacctatttattgatcaagtgactttatcaataaattgagagtttggttaatacaatcaagcctgaatgaattcgaccgcgtgattttcgccgttgtctcagacatgatcaatagcatcgattagaatcatgcgaaaccaagttcctaaaaaatctagaaatcgtgattcttcgtaggcaaggggatggccacaaatgaacgtttaaacatactgcattttgagtggtagcatgctgaataactgtttgaactgacttaatcataccatcgtgcgaattcacatttcatcttttaagacgtatatagataaatggtgaacatgttgtgaacaagtgttgagtacattttagttgactttgatctgattaaactctatgatggcaatgtgatcataaagtaagcgcttaattcgttgctcttataaagctttagtcagtttggagggtttaagaaatgcgcaaagaattagaagccgttgcgaacaaagccgatgttgcactcgctgcacaaaaagaagcggctatgctttcggaaaaactgcctaagtcagctcgtaaacgactacgcattatttcagtgattgccacttttggcggcatgctgttcgggtatgatacgggtgtgattaatggcgcactaccatttatgacgcgagcaagtgaacttaacatgtcgcctggaatggaaggatttgttgccagctcattaacacttggtgctgcattcggtgcagtgctgactgggagaatctctgatcgaaaagggcgccataaagtcatcactggcttagccatgttgtttgtcgtttcaaccattgcatctgcgttatcaccaaatgcccctatattagctggtgttcgctttattctagggctggcagttggcggagcttcggtgatcgtgccaacattcttggctgaggtggcgccatcgaatctgcgcggaagaattgtgacgcaaaatgagttcatgattgtgtcaggacaacttttggcctttgtctttaatgctattttgggcacaactttgggacacattcccggcatttggcgttggatgctcgtattggcgaccataccggccatcattttatggataggcatgagctttgtgcctgagtcacctcgatggttagcagcaaatggtaaattggatcaagcgttaaaagtattgcgtgaaatcagaacagaagcacaggctaaagatgaaatggaaaaaatcaaaatttcattgaaatcagcgcaggaagttggaaatgcttcgattaaggatttaaagatttcctggattcggcgcttggtcttaatcggcattgggttaggcatcatgcaacaaattgtcgggattaatgtcatgatgtattacggcacgacgattttgcaaacaactggtttcggacaaaatgcggcattaattgcgaatattttaaatggtgttacgtctgtcgttgcaaccattgtgactatgcatttgatgagcaagtttaaacggcgacagatgcttttaactggtatcagtggaacgttgttttcgctggtcggcattacgttaactagccattttctaaatggcagtcccttgttaccttatgcgacaattctgttgaccatcatttatttagcctttttccaaggagctttagggccgctaacttggttattattgtcagagatttacccagcccgtcttcgtggattgggcatgggctttgcgaccttcttcttgtggatcagtaacttctttgtcggttatttcttcccagttatgttggcaggactgggcatgtcgaataccttcctagttttcgttggcgccaatattctctcattgatctttgcttggaaatttgctccggaaaccgcaggcagatctttggaagaaattgaactggataataaatacgatgacaagtttcctgaagaaagtcagattaacaagaactagctaagcatcattttcggaatatttgaaagcgctttaatgagtgccgttacttctgcattgaagggagaaactcgaaatggatacaactaagcaaaatgttaagacgctaaagaattttatcaatggtaaatgggtggatgcaaaaacagaaacttttgagaatgtttataacccggccactggagatgttttggcgcgagtgccacattcgactagtgaagacgtagcagatgctgttacggcagcaaaagaggcttttaagatttggcaaaaggtttcaattccaaagcgtgcgaagattcttttcaaataccaacaattattggttgagcaccaagaagaacttgggcgaatcgtcactgaagagaacggaaaaagccttgacgaagcagttgctgaagttggacgaggtattgaaaacgttgaatttgctgctggtgtgccgactttgatgatgggagattcattgtcatcagtggccactgatgtagaagccacgaattatcgttatccaattggggttgttggcggcattacgccatttaactttcccatgatggtgccttgctggatgtttccaatggctgtagcaactggtaatacgtttattctgaaaccatctgaaaaaacaccgctaacgagtcagcggttggttgaactttttcaagaagcgggcttaccggatggcgtgctcaacatcgttaatggtgcggttgatgttgttaatggcattttagatcatccagacatcaaggccattagtttcgttggttctgaacgtgtcggcgagtacgtttataaacgaggcagtgaccatttgaagcgggttcaggctttaacgggagccaagaatcatacgattgttctggccgatgccgatttggatgcagcggttaaaggcattattagctcctcattcggctcagctggtgaacgatgcatggcgacatctgtcttggtccttcaagatgagattgctgacaagtttatggcgaagtttacgcaagcggcaaaggatatcaagattggcaacggccttgataaaggtgtcttcttgggaccggttattcgcaaagaaaatcaagagcgaacattgaactacatccaaacaggggtcaaagaaggcgccaagcttgtgttggatggttcagcagaagccaagaaacatgatgggtattttgtcggaccgactatttttgaagatgtcaaaacagatatgaccatttggcatgatgaaatgtttgcgccggttctctcggttatacgggcaaaggacttgccacaagcggttgcgatcgccaacacgtctgaattggctaatggggcgtgcttgtttacagattctgcagcttccatccgttactttagggaaaatattgatgcaggcatgttgggtatcaatttaggtgttcctgcaccgattgcagtgttcccgttctctggctggaaacattctttctttggcaccttacatgctaatggtaaagacagtgtggacttttatacgcataagaaagttgtgaccgcttgatatgatcagcggcgtttcaagtagacgatgaacaggataagggtaagacacttacaagggggattatcatgagcctgttatatcacaagcaaaatcaggaactgtcttcaggtgttcggctgattcaggatgtgaatgcaagcaactcaccgatgaaatatacagccgtcaaggttctggaattttctgcagatagttcgtatgaagaaaccttggaagcattcgaagctggcattgttgtgctggaaggcaaagtaactatcactgctgacgatcaaacttttgaagatgttggtcaacgaacttcgatttttgacaaaatccccacagacagtgtgtatgtcagcacgggtttagcatttggtattagggccaagcaggctgccaaaatcttgattgcctatgcaccaacgaatcaaacgtttccggttcggctaattcgagggaatattcatcaggttgaacatcgcgggaagtacaacaataaacggcttgtgcagaatattttgccggacaatcttccttttgccgacaagcttttattagtggaagtttatacggactcggcgaactggtcgagttacccgcctcacaggcatgatcatgatgatttgccagcagagtcactgttagaggaaatttattatcatgaaatgcgacctaaacaaggattcgtttttcagcgtgtgtacacggatgatttgagtttagatgaaacgatggctgtgcaaaatcaagatgttgttgtggtgccaaagggatatcacccagtgggtgtacctgacggctatgacagttattatctcaacgtcatggcaggcccgacgcgtgtctggcattttcacaatgcgccggaacatgcgtggattattgatcggcaataagtaaccgagattatttttaaaggaggtaaacttcagatgccacaaaaatttgatttgattgccattggacgtgcagctgttgatctgaatgccgttgaatataatcgccctttggaagatacgaaaacttttgcaaaatttgtgggtgggtcacctgccaatattgcgataggatctgccaaacttggacaaaaagttggctttattgggaaagtctctgacgatcaattaggccattatgtcacgcaatacatggctagtgtgggcattgatacgtccaacatggttaaagatgacacaggacacaaaattggactaacctttaccgaaattatcagtcctgaagaaagcgatattttaatgtatcgcaatgaagcagctgacctatatcttaatgcgcatgaagtttcgagggcatatttggctcagactaaaatgctagtcatttctggaactggattggcacaaagtccttcacgagaagctattcttaaggcattgttaatcgctaaagagcttggagtcgaagtcatcttcgaattggattatcggccttatacttggcagaatgccgaagaaacatctttgtactatcaacttgtggctcaaaaagcagatgtcatcataggaacgcgtgatgagtttgacgttttggaaaatcaccaaggccggacagatcaagaaaccattgccacattattccaatatgacgcgaacttaatcgtcattaaaagtggcatacaaggatccaatgcttataccaaggctggcgaaacttaccacttcggtgtcttcaagacaaaggtattaaagagctttggggcaggcgattcttttgcggcgggatttctgtacgcctatcagcatcagttaggccttgaaacagcgcttaaatatggcagtgcagcagcctctattgtcattagccagttaagttcttcagaagcaatgcctaacttagaccagctaacagcgttcatcgaaaaggccgaagctcaggaggtgcatcagtcatgactgcgacggaattaaatgcacaagtagctgcagatgctaaaaaagaaacgattcgactgactacagcacaagccttggttcgttttttgaatcaacaatacattgatgtcgatggtcaagtgacatcatttgttgaaggcctgtttgccatctttggtcatggtaatgtcttgggcttgggcgaggcgttgcaggaagatcctggtcatttgaaggtttaccaaggacacaatgagcaaggaatggctagcacggcaatcgcttatagtcggcaattatatcgccacaagatatttgcagtcacggcttcagcaggccccggatcagctaactttgtgacggccgccggtaacgcatatgtcaatagcatcccaattctgtttttacccgcagacacatttgctacgcgccagccagatccagttttgcaacaaattgaggttgactacagtgcagatacgacaacgaatgatgtgttgaagccagtatccaaatattgggatcggattgaacgtcctgagcaattgatgagtgcgctgctcaaagcttttgaagttttgacaaatccagcaacggccggccccgtgaccatcgccttgcctcaagatgtcgagggccaagcctatgattatccactcagctttttcaagaagcgtgttcatgttgttaaacgggttcagcctagctcagccgagttggctggagcagtcgaactgattcaagcaagtcaaacgccagtcttgattgtaggcggcggggcaaagtttagtgatgctggagctgccattgaaacattttctgagcgatttaacattccgattgtagaaacacccaccggcaaatcagcgatttcttcagattttcctaataatatgggaggtactggtatcttaggcactgccgctgccaatgcagtcattaccaaagcggatttgattattggggctggtacccggtatacggatttcacgacagcttctaagacagcaattcacccggggaaaacgcaacttatcaatattaatttgaatcgcatgcaatcgtataaatttgacgcttttccaattgtggcagatgttcgggatacgctcagtcagctgacagaaagtttatccgattaccgaagccagtttaccgacctagcaaccattaaagaggcgtggcaaaaagagcgtcaacgtttggcacacacaaattacgatgctccggcatatgtacctgaagtcaaaaatcaatttgatgctaaaacgatggccgcttatgcagagaagttgcaaacacacctaacacaaactgaggcagttattgccgttaacaatacgattgatccgacaagtatcatcgttgcagctgcaggttccttgccgggcgatgtgcagcggatttgggatccagtcgtaccaaatacgtatcacatggaatacggctattccatgatgggatacgaggtgccagctgctttgggtattaagctggcccaacctgatcaagaaagttacgcattagtcggagatggcagctttatgatgcttcattccgaactagtgacagcactgcaataccataagaaaatcaatattctagtctttgataattcaggctttgcttccattaataatttgcagatggcgcaagggagcaacagttatctcactgaatttcgcacttcggacaacgatattatgaagaccgattttgccaaaattgctgaaggctacggggcaaaagcttatcgcgctaacgaccgtaaaagcttaattgcggccattgaggacgctaaaaagcaaacagtatcaactttgatcgatatcaaagtcttaccaaagacaatgactcagggttatggccaaagttggtggcgcgtgggagtttcagaaatttccaataatccaaaagtgcaaaaagcgtatcaggatattcaaacgggtattgataaagcatttaaatattaaaggagtgacaaatatggttgtcaaagttggtgtgattggaacaggtgctatggggcgagcgcatattgatcgactgacaaatgttctcactggtgcagaagttgtcgctgtcacggatattgatcacgaggctgcagaggccgctgtgagagattttcatcttaacgctaaagtgtacccagacgacactagtctgctacaagatccagatattgatgcagttttcgttgttagttttggcggggcacatgaggcgactgtcctgaaagcgttggatactgacaaatttatttttaccgaaaagccgttggcaaccacattagaaggtgccaaacggattgttgataaagaactgacaaagtctaaaaaagtgattcaggttggcttcatgcgtcggtatgatcagggcattcgtgcacttaaggaaaaattggacactgggatcatcggtgcgccattagttgtccgagcgagtcatattaatccaaatgtagccagcaattattcaaatgaaatggcgattacggataccttgattcacgaaattgatgaaatgcattggctgctagatgatgaatacacttctattcagatcacttatccaagacaatcagcagaggttaggaatgaaggcttgcacgatccgcagttggcaactttgacaaccaaaaaagggacagttattcaggtgttggttcatgtaacggctcagtatggttatgaagttaagctggaagtgatcggcgaaacaggcgaactgcagttaccgaattatggccttggaccgattctgcgctcaaatgctaatcagcaaacggctgttgaaatgagttggatcaaccgatttattcaggcatataacactgaagttcaagaatttattgatcaggttgctaaaagcgagccaccggtcggaccgagcgcatgggacggctatattgccgctattacggccgctgctgcgaatcggtcacagaaagatcaggaaactgttctcatcaatgtggccggaacaccaactttttaccaaaacaaaaacgcgattcatgcttagtcttgcttagacaaaatagaaagaggtaattgaaacgatgactcaaaaaacgattaaaatcggcattgttggtttgggacggctgggtaaaattcatgcgacaaacattgcgacgaagattcagcacgccaagctgcaagcggcgacaagtgttgtacccgctgaactggactgggcaaaaaaggaactcggcgtcgaagaggtctttgaagattttgacgacatggtgcaacatgcggacatcgatgctgtcttcattgtttcgccgtcaggatttcatcttcagcaaattgaaagcgctttaaatgctgggaagcatgttttcagtgaaaagccaattggcctagatattgaggcaattgagcatacgcaacaggtcattgcgcaacatgcaaacttgaagtttcagttaggctttatgcggcggtttgatgactcctatcgttatgcgaagcagttggtagatcaaggtaagattggtgatattaccttgattcgcagctatagcattgatccggcggcggggatggcaagtttcgttaaatttgcaacatctgctaatagtggcgggttgttcttggatatgtcgattcacgacattgatgtcattcgttggtttaccggcaaagagattgataaagtttgggcgattggtcttaaccgtgcctatcctgttctggataaagccggcgagttggaaacaggtgcagccttaatgcaactagaggacaaaacgatggccattttagtggctgggcgtaatgccgcgcatggctaccacgttgaaactgagattattgggactaaagggatgttacgcattgctcaggtgccggagaagaatcttgtgacagtcatgaatgaggaaggtattatacgcccgacttcgcaaaacttcccggaacgctttgcacaagcctttttaagtgaagaacaagcttttgtgaatagcattttgaataaccaggatgtcggcattacagcagaagatggcctgcaagggacaaaggcggcattagctttgcaagaagcgtttgaaaagaatgacattgttcaagtagcgtctgtagacaaaaaggtaggtgcttaaagtgacgattgaattgggtattgccccaatcggctggacaaatgatgatatgcctgaattaggcaaagaggttacatttgaacaagccattgatgaaatgacgttggccggttataaagggacagaagtcggcaataaatatcctaaagatccgaagactttgaaacactttttggatcttagacatttgaaaattgctagtgcatggttcagtgcttttttaaccactaaaccatacgaagaaacagaggccgcgtttattaaacaccgagattttctccatgccatgggcgctaaagtgattgttgtcgccgaacaagggcatagtgttcaaggtttattagacaaatcggtttttgacgacaaacctcactttaccgacgatgaatgggaacgtttagcaacaggattggaacgattgggtgatcgggcccgtgaagtcgggatgcaaatcgtttatcaccatcacatggggacgggggttcaaacaactgcggaaatcgaccgattaatgacaatgaccgacccggacaaagtatcgctgctattcgatacagggcatttggtgctttctggtgaggatccattgaccatctttaaccggtaccaagatcggattaagcatattcacttcaaagacgttcgccaacagcaggcagacgaagagcataaagatcatttgagttttttagcaggagttaaaaatgggatgttcactgtgccaggggatggcatgattgacttcaaaccgatttgggaagctattcaagaaagtggttatgatggatggattattgttgaagctgaacaagatccagccaaagccaatccttttgaatatgcattaaaggcgaagaaatacctggatgcaacgatgaatattcctcagtcagcataagtgtagaaaggacatggggaaaatggcattagtttctgcgacgtcattagtggcaccggcattggcagatcgttacgcaattggtcatttcaatattaatggtgctgattggttagagacgtatctgaaagttgcacaaacgactaagacaccgatcattgtcgccacttccgatcgtatcattgactttctaggcggctttgactatatggctcgctacgtacggtttatgatgcaagcgctcagtgtgacagtaccagttgctttgcatttggaccatgggttatcagttgaccatgtttatcaagcgattgatgctggttacacgtcggtgatgtttgatggttcaaagttgcccattggcgaaaatgtggccttaactaaagaagtcgtagcatatgcccatgcacatcatgtttctgtcgaggccgaagttggtagcgtaggtggtaatgagaatggactcgtcaatgggattcgatatgcaagcgttgctgacgctgttgagatggcttcaacaggtattgacgcattagccgcggcacttggatccgttcacggtgattacgtcggtcggccaaatctgaattttgaacgcatggccgagattgcagcggctactaaattacctttagtgcttcatggtgcgtctggcattttagatgatcagatccaacaggcgattcagttaggcactgcaaaaatcaatatcaatacagaagttaatacagtttggacgagtgctgtgaccaaagccctgcaagccaaacgttccaatcatgacccgcaaccaattttaactgctggtaagcaagcaatcgcgtatttggtagaagcgaagatgaaggcatttcatgtgttagggaaaagtactcgcctatcttctatgagttgatgtgaacaacaaatttatccaagagggagagattaagatgccactcattcgttttgatatgatcaaaggccgatcacctgaagagattaaggacattttacaaattgctcacgaggtcatggtagcagcttttgacgtgccaccacgagatcgttatcagatcgttcatcaacatgagccttatgaaatggtcgtcgaggacacaggattagatattccaagaacagatagggtcattgtcatatcgattgtgagtcgagtccgaaccattcgacagctaaagaaattttatcaagatttagcagataaattggaaactgccggattagtggacaagaatgacctcatgattaacgtttcattcaatgatgatcaaggctggagcttcggacaagggaaggcacagttccttgaaggtagtctgtaacgacaattgaattagaagcaaacgcaatatcgttgaccacttacgcaataaatctgaattggttacgatcagtgttcaacggatttctaaggcaaaatcagcgatattaggtttttagttttttccatgagaaaagcatctgccatgaggttgcggcagatgcttttttatatactttgaaagattgggcaagggcaaggcggtgagctcaagcgcttagtgccgcgttgcatcaattgttgctcttacttggcggaaaagcggtgctgtctgactatcggttttgatggcactgatcataaagagcgtgtccataatgctgatttcggcaatcagtgcatgaagcgcctcagtgcggtagcgtgattcttcagcaactgcaacaaaggcagcatctgccattttgactaagcgcgaagttggggaaccggtaatgacgattaaaggcacttgttgtttcttagctagttcagctaatgcaatggcatctttgtcctctcctgaatgcgatgtcaggatcatcgcatcgcgcgggctaagatgtgtggcggccattagctgcatgtggtagtcagccgcataggccacgggaatcgccgtgcgcaaaaatttatggtaaccgtctagtgcaacaagattactggcacctagtccaaaaagtccgagatgctcggcatgggtaatccatttaacagccttggtcaaagcatcagtatctaggtttgctaaggttgttctcagtgcatcaatgttggaggtgaaaattttttgcgctagcgtatcaacggaatctttgggactcaactcagcaaaaagcgcatgatcatcctctggtgaagtctgcgccaacgccatgcgtaaggcctgaaagtttgtgtaacctaaggctttagcaaagcgggaaatcgtcgctgtactgacgccggtcaattggctgagttccgagatgttggcctgactggcatggtccgggtgggcttgaagataggcagctagctttttctcctggccacttagattcggtttataaatttgcagttgtaccagaaagtcatgcatcttgatccctcctaaaaatacattcaccagagcagaaacgagaatgtcagaattttaagtcgcattgtcagagtgcgtttattgtctaaggctgatggttaattgcaccaagcgaaacaccacttttcgaattcagtatagcatgaatgatagcggtgtgaaaataatttacggtcaaattacttgatttttgtaaacgatttacatacaatggcatcaggatataagataaccatcacagaagcggcttgtttttttgaaaacggatggtcacagggtcaaataacgaggaggcagcaaacatgcatattggcatggttggtttaggaaaaatgggtatgaatctggtcgcaaatatgcgcgatcatgatattgaagtgacagcatttgatttgaacgacaaagcgcgagaagcggtagggcaatatggggccaaggcagtggcaagcctggatgccttagttatgagcttggcatctccgcggatcatctggagcatggtgcctgctggcaaaccgacagaagccacgattagtcagctagctaaactgttgcggccagatgatattgtgattgatggcggcaactcctattatcaggattcaatcgcacacggaaagctgctagctgctgagggaattcatttctttgatgtcggcacttcaggcggcatggccggtgcacgcgccgatggcaatttcatgattggtggcgacaaggcgatctttaacaagattgagccgctgttcaaggcgatcgctgcaaaaggtggctatctgtatactggcccagctggatctggtcactatttgaaaatggttcacaacggtattgaatatgggatgatgcaggcgattggtgaaggcttcgatgtgttagcccacagtccgtatgactacgacaatgcggcggttgccaacatgtggaacaatggctcggtgattcgcagctggctgatggatttggccgccaatgcctttaccgaggatgcgaaccttgaaaagattcagggtatcatgcacagctcgggtgaaggtgcttggaccgttgaagaagccttacgtctacatgttgcaacgccggtgattgccagttcgttgatgatgcgctatcgctctgaagaagcagatacgatgacgggtaaagtggtcgctgccttgcgtaatcagtttggcggccatgcggttgatccaattaagtcaaaataacttgcaaaaccatcgtgatatcgccattttaataactaagtcaaaattgattaagtaaaggagataagcatggcaatcaaatatatgattggcgttgatctgggcactactagcacaaaggtcgttttgtttgatctcaagggtcacgcaattgcaaccgctaacaatccctacccgttatatcaagatacgcccgacatggctgaggaagatccggaagagatttttgcagcgacagttggcggtttaactgaagtgatgcatcgcggtaatgtccaacccgatgaacttggtggggtttccttttccgcagcgatgcacagtctgattttgatggacgaaaatgataagccgctgacgcgcgtcatcacgtgggctgataaccgagcagcagcctatgcaacgaagctgaagcaaagcgatttagggatgacactgtttaaaaatacaggtgtgccgacgcacccgatgtccccattggttaaattgctttggttgagtgccgaacatccagaattggtcgctcagacttcccactttattggcattaaagactttattttgttccgcttctttggccgatatgtgcaggattactcgctggctaacgcaactgggctctttaatattcacaccatggattgggatgaccgtgcacttgatgttgccaatgttcggcgcgatcaattgccagaactggtcgacaccagttatcagttgacaggattaaatgccaactatgcggcggtgaccggtattgatgctaaaacgcctttcattctcggtgccagtgatgggacattgagcaaccttggcgttggcgcgattgatcctggtgtcttggcggtgaccattggtacgtcaggtgcagtacgggttgtgactgacaagccggtagttgatccgcaagggggcctgttcacttactacctgtcaccgaatcactgggttgttggcggtccagttaacaacggtggtattgtcttccgctgggttcgtgatcaactttttgcaccagagaaattaacggccgaacaactgcaagttgattcctatgaaattctgacagaaattgccagcaagatacccgctggtgctgatggcttacttttccatccatatttaggcggagaacgggcaccgatttgggatgccaatgctcgtggcagtttctttggcttaacccggcagcatacacgtgcgcatatggtgcgagcagcactggaaggtatcgtttacaacctatatatggtgatgctgatgatcgaaggtattactggcaaaccaaaagccatccaggctactggcggatttgcgcgcagtgcactgtggcgccagatgttggctgacgtttttgaacaggaagtcaatattccggaaagctttgaaagttcagccttgggagcagttgttttgggaatgaagtcactgggactgattgacgatttgaacgtggttaaagatatgattggtgtcaccaatacccatgaacccaatgctgacaattttcaagcttatcgtgagttgttgccaatctggattcgattgacgcgtaaacttggcagcgagtatcaagcaattgccgactatcagcgggcgcatccagatccgaatgcccatatagctgctgaggattagtcgccagcactgcgcctgttgtccgtgctaagacggaatatgctggttcgatgggaaaataacgagaatgaagcaactgggtacacagatcaaacgacatgtctcgagaaaaacgtcaatgaacgtttttcataaataaaattgtaagcgatttcttaatctgcaaaatttagggggaatagaaatggatatactcgtcctggtcttaggtatcctgctcttactggtgcttatcatcaagtttaagttcaacacgtatgtttccttgatcatcacagctgtcgtcgtcgcccttggtttgggaatggcgccagccaagattgcgaccagtattcaaaatgggattggcgcgcaactaggtgagctggccttggtcttcggcttcggtgccatgcttggtcgattggttgctgatgctggtggagcttaccgcattgcgcataccctcatcaatgcctttggtcgccgcggattgcaacttgccgttgttttggcatctttcattatcggtattgctttgttctttgaagttgggattgtcttgctagttccaattgttttcgccattgcggctgaagcaggcgttccaattctgacacttggtatcccgatggcagcggctttgtcggtgacccatgggttcttgccgccacatccagctccaacggcgatctcgactgcattaggcgcttctgctggtctggttttggcttatggcgtgatcatcgccattccgactgtttatattgccggaccgttgttttccaaacttgcgcatcgctttgtgccagatgcttttgaaaggcgcggtaatttgaaagcattggggccgcaaaaaacctttaaattggaggaaacaccaagttttggcatctccgttctcacatcacttttcccagtgattttgatggcgattgccacggtttatgaattggtatttcatggtggcaaacttccaaagacaccaaatggtcttgataacgttatcgcattcattggttcaccaagtatcgccatgctgatttcattgttgttcgctatgtgggcaatgggctatgcgcgcaagctgccagccaaagccattatgacaaccctcgaggacgctgtgaaatcaattgcgatgttactactcgtcattggtggcggcggtgccttcaaacaagtcctgattgatggtggcgtcggcgactcagtaaaaaatttgttcgttggctcaggcatttcaccacttatcttgggttggctgattgcggttgtcttacgaattgcactgggatccgcgactgttgcggccatgacggcctctggactggttctgccactcatgcaaagtgctggcatccagccagctttgatggtactggcaattggtgcgggttcattagctgccagtcacgttaatgacgctggtttctggatgtttcgtgagtactttgatttgaccattaaacagactttgttgacgtggacgttgttagaaaccattatttcagttgttggacttggtggggtgctgttgttgagtttggtggtttaagagtagctgaggaaacttaggacattcaatctaagcaaaatgatcttagagaggagcttatctttaagatcattttttctattcaaaaaacaaacggcatagtgatcgcttaaattttgtttaactaaggaactggatcgcttcatttgcacaaaaatggttaaagaaaagggcaaatcatgataacatgatgacgtttatgtgaatttacttgggcttaggacaaggctagcacgtggtaaagcttgaaaatcgggcttgcgattgataccattgacgaagctagtttgtccttacatactatggaagcgaacggagtcaagatgaaaaaaatggaaatcagtaagtttgaacgatactttctttatatactgttctttgaattgtttgctgggggtggtggtcgtctgcttgcagttgggccactttcgattcggcaaattttatttgctggattgattattatatttgctatcagatttgtggtgagtccagatactaggcgtgagatttggcaatacttccgccaccccaatacggctgtgttttggttatcgttgctgatgacagcatggatattcgtatctagtttcattgggattatacatgggcatggagccggaccagttgcaactgatttcttccgggtcatttatgtcattttaattattccatttatttattatgttggagagcatcgtttttcagttaatgatttagttcggtgcttatttgtcgccgccggtgtcgtagcaatactgacagttttcattagtttgacgggcaagtttattgatgacgcaactttccacgacttttatgaatggattaatggtctcatgccaggcgatcttttcttcaggccttcacgaggggtcttctacaagtcagattttctggtcatgtttactgttattatcggcttgattaaacttgctgagaaaaagatcagtttgggcgaaggtattgtcctaatattgggttcattatctatcattctatcggagactcgtggcctttatctgggaattttggtcgggatcggcacctacattgcagtgaaagtcgtcatctatttctggggtgatcgatattccttaaacttgaacagagcaatgaatatacgacgagcgcttgttttattggttactgtagctctatgcggctttttttacaccaatgcaacgattgcacgatttagtaagccttcaccctctgatatcagacaggaggatcgcctgaaaaagcaagatcgaaatatttctggcgacgacatcagtctgagctcacgatttgtcttattatcggatgcaatggacattgttaaaagcgaatctgcagttggagttgttgtgggtaatggctatggaacaacaattggcaataccaagattggtattgaaatgagctttgtggacattcttgttgaacaaggtgccatgggacttgttctttggctagcgtttgcacttttacccctttactatttcttcagaagtttccttttgagcagacaactggctgatatttacattggcctattgggtagttcgctatccatgattttggtgacgaacattaaccctttcctgaacagtcccatcggattaggcttcttgttgccggtcattgtgattgcgtacaaagcatttataagcgccaggacgaaaaaccaacccgctattaaaattagttaaggcaaatacactattttaaggtacctgtagacttatcggagggaaagtatgaaccattctggtcattgctttttgattgttttgtacaaccagaagctgagtacaagcccggcctatcaaagcttaaagccacaattgctgaccggtgacaacctaattgtctatgataattcgccggtgtcaatgttggatgttaaggcggaaaattttgtttattttcatgatgtcactaacaccgggctggcaactgcgtataactttgcagttcaaaagtgtcgtgaaaccggtcatcaatggttaacaattttcgatcaagacacccgtattccaactggctttcaccacgacgttactgaggcaattacttcatcgaatgccatcaccgtgctggtaccacaggtcacattggaagatggtacaagcctatcaccgttttggattgaggatgctttgtttgtccactaccctgccaaggatcagaagacgttagcggcgatcaattctggtatgacgctcaatttagcgactttttcgactgatgaagagctttttgacgataggtaccctttggattttttggattatgttttttttaagcgacttcaagctgaaaataagcgtgtgtcacagctacccattacgttaattcagtccttgtcattgagtgacttccgtacgatgagtcaaaaacgctttgagagtttccaatttgccgaatcgagatttgtgactgagttttatcctcaactgattaatcagtaccatttacgcgtcatgctcaggctcgctaagcaactgttgaaaagagttcaatggcccaagctgaaagtgatgcttcaagtagtcggaggaaaaacatcatgatgatttcagtttgcatggcaacatacaatggagcccggtttgttggtgcccagctcaaatcaatccttgatcagcttgggtctaatgacgaggtgattgtggttgatgatcactcgactgatgagactgtcgctgtcatcgatcaatttaaagattcacgcattaagttgatcgaaaacacgactaatcacggcccaatttatggctttatgaccgcgttgaattatgctaaaggtgattatctttttttatctgaccaagatgatgtttggtgtcccaacaaggttactcgcgtcatgacagcttttgagaaggaaaaggcagtcgttgttgtccatgacggtatcgtcactgatcagtcgcttagtcgggttgacgattcttggaatcatttcagtcatagagtaccgagtcagtccatgattaaaacactaatcaagaatggatacaccggtgctatgatggcctttagtcgcgaacttttgccactcattcttccttttcccaagcaggtgccaatgcacgactggtggattgctttggtagccatgaaacaccacatgaagattgtcgttttgccagataaattgatgtattaccggcgtcatgccggtaatgtgacgggtagccatcgcaaactgcatgaaatgatggcgtttcgtttcaatatgttacgactttttattcgcgcttaatgactgatggctagtgcaaatcggagggtcacttatggtcaaagtttcaatcattattcctgcttacaatgctgctaccactctaaagcgcgctgttcagtctgtccgtaaacaaaccttgaacgattttgaaatattaatcgtcaataatggatcgacggatcagacagcagcagttatgtcacaccttgtccaagctgaccctcggatacacattctgcaaagtatgaaagggcgcagccgcgctcgtaatcaaggactgacaaaggctcaaggtacttttatccagtttctggacgcggatgacgaacttgctgtcaataagctggaagtgggcagcagttatttgacgaatcatccaaacagtagcgcatacatcacggcggctaaatatcaaaatgataagcgtggcgatgagagcattcgccagattccgctaacatccgcagcacctttattaaaggcaaattatttgccaatgagtgcaccgcttgtgaggaaaagtgcgctcataaagccctttagagaagatcttgaatataatgaggactggttattttgggctgaaaacctgtacaaaaaagagatagctgttagctcgacagttggcacaacgatccatattacgtctgctaatactatgactcagtttgatcgaatgcaaatgtacgagtgttatgtgcggggaattttaaaagaagaattttcggcacgcggccctcgctactgggcgcgggatatgcgctatacactcaattatctacttagcgcgtcggatgcaacgagcgaggacctgaagctatctaagacaatggcttggccaatccggtttagccgtctattattagctgtgccaccgttgcgagcggttattacaaaaaaacgtaatgccgtgaaagcgcgtagtcaatatggataaaatgcaagagcagttgaggtactgggaacactaatcggtggtggaaaatttggagggaaaaacttgataccaaaaattattcattatgtttggattggcggtgcgaagcccgattcggtgcaaaaaaacattgataattggaagaaagtattagcggggtatacatttcaagagtggaacgaacataattgggatatctcgaagaaccagttcgcgaagtatttctacgataaaaagcaatttgcattcgttggagatgccatccgagttgatgtgttaaaccgaattggtggaatctatttagatacagatgttgaagtttataagccttttaattctttgctaaaggaacaactagtttttggtcgaatttataataatgcgataggaacagctaccattttggctgaaaagaatactcggatgatgaacgatttgtcgaatatgtataaagcatttgatttgacacaattagaggataataccatcgacaaagttaataatggcatttttacaagataccttcttgataaacacgtcggcttttcctttggcaataccaaacaacgattgaaaaatggcgcgctcatcttacccaagcaatattttgaagtgccagcaatgtggtttgaaaccggcacatttgccacgcatcacgtggcgggcagttggcaagataaaaagcaggagagtaacaacgagtcaaaagggcttaagtctggggtaaaaggcttaattcgttcagcttttccggctgctattgctcgatacgagaatcttaagggcggccaaagtaatagtatcgcaaaagaatttggacctaaagcgcctcagtgatgtaagcgtcctaacatatacattaattaggaccgagtcatgcaaaaacactgctttggcagcacgaaacagctaattaaaaacctatctcgttgatatttgaggcttttacaattactggattcaaacgtatgatgatcgtgttaaactaacatcatcgaaagtttggcgaggttttatggggaaatagtcaaacggtgtgtgtgttcaagttactgaattctaactaggaggagttgtagaaaatgaaattgagtaaacatttcaagttaatcatgacgggggctttttctttggcctcagtcggcttgtttgcaccgattgtattggggcaagggcaacgagtctatgcaggtacgtccagcaccgttagtactgtggttaacggttctgatgaacaagactttcatctcacaaatcagcattcgaatcttgataccgataatcacgttctgggcggtggtcaggcggcacctgctttgcgcacaaagcgaagtattatgagcaatggtttacaagcgaatagcattcaaacatattcacaaactgttatgagtttcacaattggagattcacgagtgccgcgagtcgataccgtcgatgtggcctcttatcaaaatgggatgacccaagctaattacaattccctcagaacctcgggagttaaagcggttattgtgaagtcttctgaaggatcaacttaccggaatccatatgcggcaaaacaacttgctcaagcgaaggctgctggactcaaaacggcagtatatcactacgttcattttgcaaatcaatctgatgccattgctgaagctaattactttgcgaacactttggacagtcttggtttcagcaaaaccagtccagtggttgctgatattgaggatagtgatgttggcggtgatgtcgcagccaatgtcaacgctttttggaacgtactgagtacccgtggttatgttaatcatattgtctatacagggctttattactcatattccaaagcagcaatttcaacagttggtaatgagcgttcctgggtcgctcagtatccatatgttccaagtgcgaacaatcttctgaataccggctatggtgcatggcaattttcatctatggcaggcatccccaactataatggtcgcgtggatgtctctattgattatcaaggcatttttacgagtgcattttcttttgaccacgttattgatagtcactcacttagcggtgtgaaacagattgatgaaaccaatcgtgcagatggcatctattccgcaccatttaatacggttgccggagcgaccatcgaaaatcatgatggcgtcaactacaacggcgacatggtgcagttgattcaacaagcaacgacgaaaagaagcacgtatgttcaggtaaaggcgtcaaacggaaagattttttggattgatcaggctgcccttaaagatcccaaaccggatccgattttagctaaaaccgctgaaaattattttgcatccattaatcagacaaatcgcgcggatggtatttattctggtgggccatacagaacaacgccttcagcatatgcggctaactcaaatgcccccaaattcaaaggccagctggttcatgtgctggccactgagagaaccagatggtcaactttcgctaaaattcaattcagtgacggctcaatctactggatcgacacacaggcgttgaagcgaagcggttttacgtctattatttcttcgcagacaaccagttatcagggcattattgatgaaaccggtcgaaaagatggtgtgtatcgcgacggcccttatcaaacaagtgcggccacatttttgatgaattatgatggtcctaagtacagcaaccgtcttgtgactgttttgaagacttcaaaaacagcttggtcaacttatgccaatgtgaaacttaatgacggcaccactttctggattgacactgcagccattaagaaagtagccctttacccaactctgtcgcaagaaaaagtcgattataatgctgtgatcgatgagacaaatcgtaaagacggcgtctacttaaccggtccatatagaagtaatgtcagtgaatacagtgaaaatagtaatggcccgaaatataacggtaaggctgttcacgtaacggcgcaagcgacgaataagtggtcaacttatgttcaggttacaacagctgacggtactcgtttttggattgacaaggcggcaataaagcccattagtctttatccgatcctttcgtcttccaaccagtcgtacactgcgactattaatcagtcaactcggtctgatggtatctatgcaagtggcccctattcgacctcactagccacttatggtattaattacgatgccaagaagtataacggtcagacggttcaggttctcaaagaagcacggacgagctggtcaacatacgttcttgtcaaaacggctagtggcgcacagttttggatcgataagcttggcattcagtcgtcatatttcccaacgctgtctcaaagcaatgtcaattatgatgtcttaattgatgagaatggtcgtgcagatggtatttactatgctggaccatataattcaaatgcagcaacatccgttcaaaatagtattggtccgaaatataatgggcaggctggacatgcttctgttgaagcaaccaataagtggtcaacttacgtgaaggtgacgctgacagatggcacgagtttctggattgataaggctgctatcaagtctctgccaactgatccagtgctgagtagacgctcagtgcattacactgctacgattaaccaaaacaatcgagcagatggcgtctatacgacaggcccatatcgaacttcttatcagacatatacgattaattacgatgccaaaaagtatgatgggcaacaaggaactgttatgcaggaagtacagacatcttggtcaacttacgttcagattaagctgggttctggcgcaaccatttggctggacaaagccggtgtccgtgcatcgtaatgttggatagaaaattaaagcacaggagctgtatttcttgagcagttttggatatcgtgatcatgtcagatcacgatattttttcggctaaaattcgggaaatgctaagaaatctttaactgttcagggtaggcgatatctgattcgatatctggtaatattagtaggtgttgattagttaacaaccgagcgctatcgttccatctcgacagcgcgcaaatgcaagttttggagatttttatgaaagtaatcaagaactttttttggaatgcgggttatcaggtcttcgtcctgattgtgccgctggtaactgtaccttatattaatcgagtactaggaccgacaggcgttgggataaatgcgttcactaactcaattgtccaatactttattctctttggtagtctgggtattaacctttatgggaatcggggcacagcttatcgaagagatgatcgaaaagcgctgaccacctatttttgggaagtcaccatacttcgatttgtgacgattggtatagctgtgcttgcgtatctcatgtttatatttgccgtcgatgagtatcgtgttttttatcttgctcaaggcgttatgcttttgggaacagcgtttgatatttcgtggtttttccaaggattagaaaactttcgggtaacggtggttcgtaatgtgttggtgcggatcgcttccctcattctgattttcctgttagtgcataaagcagatgatactgctttgtatattctgatcatgtctggctcacagatgttggggaatctaacattctggccctcattacgcgcaaatctgacacattttccgaaactgtcaagcctgaacatctggcagcatattaaaccggcgttccttctattgattccgcaactggcgattcaaatttatgttcaactgaataaaacgatgcttggaattttacagggtgttacggcatctggtttttacgaaagttcggacaaaatcattaaaatgttattggctcttgtgacagcaaccggcaccgtcttattgccgcatgtggcccattattttgcccaaggtgatcacgatgccgtcaaacgctcattagaaacatcgatgcacgtgattttggttattgcttttcctttagcctttgggattgcggcggtttccacaacgtttacttattatttttttagcacaaagtttatgcccgtggcacccttgatggcagctgaagcgattgtcgtcattccgatttcgattgcgagtgccattggtgtgcaatatttgctgccaactaaccaagttaagtcatatactgtctcagttattttgggatccatcgttaatattgtagtgaatgtgcctcttattctgtggttaggaacaatgggcgctgtgattggcactatcctttctgaatcagtcgtgacgatttatcaggtctatgctattaaaaatcagcttgatctcagaggcttgtttagtgaatcatggaagtattgcctcagcgcggtcgtgatgtttggtgttgtaaaaggtcttgagattgcctggtccaccagcttgatcggcctagttgttgaagttttgattggtatggtggtgtactttgtggtgctgttggggttacgaccgcacattatcattgggtatgttcgcccatatgtcgatcagatgcgtcggcgtcttcgttaaactgaattagattcattaaggggagttatatgatgaagattgggttgatccttaactatcgaaattatcgacagaccatcgcatgttgccgcaacttaatcaaggctggactggatcgcattgtcgtagttgataatgggtcgccaaatgaatcattggctaagcttaaatcatctttaggaaatgatgcaaaagttagcattctaggtaccaaagccaacttggggtatgcgcgaggaaataactttggacttcaagcaattgaaaaaaagtttgggctagcggacgatcacctcttgtatattgttaatccggatagtgtgcctgatgcaactgtgattaagcagatttcggcgttttgctggtctcatcccgatgcaggtaccatgacggtgatccaagagggtaatcctaaaatggcttggcataatctgaccaaaacacgagcaatgctttataactcaagaatcttttctaagcttgcttatcgacttggccatcatgaagaagttgtgccttatcatgtcgcaggacaaaggacagcaagcattaaagtcgatgtgaattctggggcattctttgcaatacgtcaaacggttatggcaaaggttggttattttgatactgcgaccttcctttattatgaagagcaagcattatccttcaaattgcaagctcaaggatttcagaattacttattgacaacatcaacttatcgccatgaagggcagggatctacccacttagccacgcgtgctatgttggggtattatcaacaaagccgacgatatttactgaaacaatatttgcatgcaggcccattagcgttgagattttatgattggacgattaggcttgaagatatcttggctggcgacagatcaaaaacgtaaactttgaaatgcgtgagctgtagttaagagtgatgcttacgtaatgtgcttgatgttcgttggattttgactagcaatatttattgaatgacgaaaggaacagatatggacattcaggaccagcttaagcaattcaagggcaaacgagtacttttgcttgctccgcagttttttcactatattgacgaaattcgtgatgccatgaaagctgcagaaattgattgtgatttccttgatgagcgcccactgccgggttttacaggaaaagcaatcgcacgttatttgccaatgattaatgagcggcaggttgccaagaatgttgatgatcaattgacagccaagagttatgactatctcttagtgattaaaggcgaatccttgagcaccaaactcctggcagactttaaacaggaaaacccaaatgcaaaactagtgctatttttgtgggattcggtggcaaattccaagcatgcggaagcgttttttgaccagttcgatatggtttacacatttgacgcaaacgatgccgcaacttataaaattgaatttttaccactttttgtagggtcacagtttgatcctcgtctgattaatcaagatcagcagcaggatattgatcttgcttttattggtaccgtgcattccaatcggagtgagttattgaatttagttgaaaagcttgcagctagtgcacatttatctttttatgatttccgatatgttcaaagcaagcttgtatatgctgtcagatatttacaagatcgtgctttcagaaaatcgccagccggtaccgtccattttaataagatttctgctgaagcaatgctgaaaactttacggcgaaccagaacaattgttgatgtcacccatccaaagcaaaccggactaacaggacgcgtgattgaaggcttatcaatgggtcgaaaagtactcacgacaaatagtaaggtcttagattacgactttatcaacaaggaaaatgttcaaatatttgacgagaagctcacaaatttagatgaagattttatcatgaaaccatatgtgggggatccattaatggtttataaaaacttttcagtctataaatggctggagacggtactgaccgggactgcttatgtaccggttgaccatcgatcggttgttgaaaaggattagtcgcttagaaatggagatcgtttacacatgtacgaaccaactaaaaaacgccgcgttgccgaagacgtggccaaggttttccctaaagaagtcaccaatcagatttttgatgtgatcgctgtgatgaataaggctaagcaaattgtgacagcaccagtcgccattgcattttcggatgattataccgatgatgaaatgtatgccatgatcattcaaggcaatcttgcaccagcacaagagtttccgcttacctatgctggcgaaaagccatttttgggtcatgggtatatccttgtggtcaaagataagccgaaaacaattcggctggatttcagtacggctaatccgtttaaggcagaagaatccaaataaaactggccttttcatgaaaagttcgatacaatagtaaaccgtaatcgttaccgtttactattgggaggcagctatgagcgaaccgattttgaccgtggatcatctcagttttggttttcggaatcaacagctttatcaggatctgagttttcagttgaatgtgggctcaatgacaagtcttgttggtccaaacggggtcggcaaaacaaccttaattcggttactaatggcacaactaaaaccgcaagccggaacgattcgctttcggcaacagccaccggttcgattgggttatgtgccccagttccggaatgttgatacggaatttccgttgtcgatccgcagtttcattcaactccggcagttggatcatctctttttctggcatacgggtaaggagaaggctgccctggatgccgtgattaaagcgactcaccttggtaaaattgctgatacgcggcttggaatggcgagtggcggcgaaaaacaaaaggcttatctggcacaagctcttttagatgatcctaactttctgattctggatgaatcaacggccagcttagatgtcaacacgaagcaggagttgatggatctggtgcaggagttgaatcaaacgcggcaattaacggtgctatttgtgacgcatgatctgagcttagccaaaaagtacacccaacaatacttactactgaccgggtcaagttatgagatgaagccaacagcgcaaatggatttgaaagcaatgccagaagaattacgcaatgatgccgagaatcgtggggtgatcgcatgaatttatttgcttatgcattcatgcaaaatgcattcatggcaagtacgtttattgccattaccacaggcattgtcggtgtgttcgtcgttgcgcggaacatgtcgttcttagcccacacactttctgaagttgggtttgcaggcgctgcgtttgcggtgtttgctggcatcagaccgttagacgggatgttgttgttcacagcgatcagtagtatcagtgttggccgcatgtccgttcaagcatcgcggcgagaggcctcgatcagtgcggtttccagtttgtttattggtttaggcattttgtttctgtcactttccagcgctaatgctagttatgcaaccaccattttgtttgggagcatcatcggaatctcccacgccgatgtctggcaactggtggcattggccgccggcgtactaataacgttgtattttggctatcggcgactcgcgtttgattcgtttgatccggttggttcggcggcgcagggattgaaaagtaaatatatttccatttactttctgctcattcttgctgtttcggtttcgattggagcgcaaattgtcggaagtttgttggtctttatcttactgaccttaccgcccaatgtcgctaagtatctgggtcgaactttaccgcagatgattgtgatttccgtcattaccgctttaatcggggtttggagcggcttgtatttaggctttttgacgaactggccggtgacgtttttcatcgctgccattgaatttcttttttatttcttggcattgtggtaccatcaccgaacaaactaagcaattgaaaaaggactcgcaacacaaaccgtattgagtagcggttgtgttgtgagtcctttttgacttagttagtgttgatggcgatatttgtgcagaaattcagcaacttcctgttggtaatcgtggcgctgttcgaattgtttgaggtaagcagcattgtgagtgctggtggcgccagtgtggcgtaacttcatgtaaacttcaggatagggtaactgctgttgcttggctagtgataactctgcggacacgtcgtaaggcacctgccgcagatcaagatcggtgatggcaccatcattgagttgcagcaatgcatagtcggcgtaagtggttgtttgcaggtgtggccggggtgaataggcttggccaatagaacctggattgaggatgacttgaccgttactggtgtagcgcagtagctgttggtgggtatgcccataaacagctagatcaatttgcgaatcgggggcaatttgatcaaagttgagttgtggttgatcaggatataaggcatgcccatgatttttgtcaggaaggttgtgtgctagactgacgatcaaaccatcttgctcgaaaacttcatgcagcggccaatttcgaattgttgccagattttcagccgtgaggtgcggccacagataggcaaccagtcgactaaagtaaacatctgttggctgtgacagatcaactggtccatccagtacccagaataaatcgtcatcccagttgcctttaacgatatgtgtgggtttgagtccgtgcagcgtcgcccataacttatcagaacctggaccgggtaaaaacaaatcgcctagaaaccagtattcatccgcctgatgcgccttcgcatcctgaatgaccgctgaaaaggccgtcatattgccgtgaatatccgataaaatggcgattgtcgtcatgcttgatcccacctgtcgttcatcgtaatcaacccttgcgttccgaggttgcccttaccagtattaaccatttgttcatacagctgtttggccaattgcgtggctggtagttgtaagtgcatgttatcggcttcatccaaagcaatgcgcagatcttttagaaaatgttttgcaaagaatcccggcgtatagtcgccttgcaggatacgcgggccatagttactgagactccagttggcccctgcgccaccgccaaccactttaagcgtttcgtcaagatccagtccagcagccttagcatagacaagcatttcggtaagaccggtcatggtgccagcgatcatgatttgattggccattttggcatgttgccctgagccggccgggccaaaataattgactgagccggcgatgggcgcgaaaagttgctgcaatcgcgataacaaagtcttgtcaccaccgaccatgatggttagcgtgccatttttggcgccgatatcaccaccagaaaccggcgcatcaacggcttgcaggcctttctcggcagccttagcagcaattttcttcgccagagtgggggtactggttgtcatgtcaatgagcagtgccccttttcttgccccagctaaaatgccatcgctaccaaaataaatggtttcgacgtcttgtggaaatccgaccattgagagaacaatgtcgcactgcgcagcgacagcgtgcggcgattcagcccaagtagctccagcctcaatgactggctgtgcatgggccttcgttcggttaaagacgaccacttcttggccattctttaaaaagttcttgataataccggtgcccatcacaccggtgccaacaaacccaagtttcacactgctcatcctttctgcaaaatttcttctaattcagcgagtcgttgttcaaatagtgagaaggcggcttctaaataatctggtttggtcatatcaacgccggccgctttcattgtatcaatcgcatacttggaactgccagatttcaagtagccgatatagcgggaaaccgcctctggttcgccaccgctgatgccagcggccaaagtcgaggcagcggcaaaaccagttgcgtactggtaaacataataattgtaatagaaatgtggaatacgagcccattcaaaggcgatttcaggatcacgtgcaacatctggtccgtaataacgggcattgagatccgcataataggaggacatgctggtagccgtcaatggttcaccatgctggtcttgttgatgaatccaatgttcaaagtcagcaaattgagcctgacggaagatcgttcctttgaagccgtctagatagtaattcaaaatgtacgcccgaactttaggatcattggtgttttttaggaagtagtccgtcaataaattttcattggttgttgaggcaatttctgcgacgaagattgggtagtcgccataaacgtaaggctggtgatgacgagtataccagctgtgcacactgtgaccagtttcgtgaaccaaagtgtacaattcatcaacggcatcgtgccagttcagtaaaatgaacggattggtgtcatacgcaccaccggaataagcgccggaccgtttgcccttattttcgacgacatcaatgtaacgattattaaagatttcccgcatatgatctaaataatcatttcccagcggagccaatgcctttaaggcttcgtcttttgcctgatcgagggtgaaactcaatggcggacgtccggtcagcggtgtgtagatatcatacatatgcagttgatcgacattcagaatctttttacgtaaggcaatatagcgatgtagtaatggcaagtgagcgttgacttgatcaagcagtgttgtgtagacactttcggggatgtggttacttgccattgcagcagcgcgagcatcgggataatgatgcgctaaagcattgaagttatgagctttgatctggccacttaatgtttgagcaaaggtattcttaagactttcatatgcccgcagcaaagcctcaaacgcgtctttacgcagcttgcgatttgttgaccgaatgagttggccatacaaaccattgctgagttgcacggtctcaccgtcttcattttcaacaaagccaaattgcaggtcggagttgttcaacacattaaaggttgcatgactggcattcagcgcatccccagcactagcaattaatgactcagccgctgtggtcaggacgtgttggcgattcacagtgatggcatcaataaagtgaccatagggtttgaggctttcggtatcgcgccaagcggtcaactgatcggctggaatcgccagaatttccggatccatgaacgctaattggctggcaagatcagcggccagactttctgctttggcattcatggcttgatacgctgcattgccagtgtcttgatcacttttcaagctggaatagacataaaccttttcaaagcgtctgaacaccgcgagaacggctttgatacctgcgacaagtgcttcaggcgacttgcccaatgtacccttaagtgctgccgcttcctttgcttgctgacgaacggcttcaaagtcaacttgccaagccttgtcatctggataaatggtcgtgagatcccatgtcaattcagtagggacttctgcgcgtgccggtaaatgttgcatctaatcagctccaatttctaatatttctttaatgttaccatattgaggcgacatttgaggtaaatcccttttttcttcataattatctgctaaactactctggaaactaaaagtggagtgaagctcgaatggacaagcaacaaaactcagatcaacaaacattaaaacgcaaaccaaaacgacgtcatccgattttacgtaccctaacagtcattttgcttgtcgcccttttcttggctggcggatatgccgcccgattttattcacaagccaaaaaggcggttgcgaaaacatatgatccagttagtactaaggcggtcagttcagatctcgatggcaaaaaaccgatcagtattcttctactaggaaccgataccggtgcctttggtcggaaagataccggtcgatctgacactatgatgctggtcacgatcaatcctaaagagaagaaaacaacgatgaccagtattcctcgtgacacgttggcggaaatggtgggcacaggaaatgattcacctacctacgaaaaaattaactctgcctatgcatatggaaaatctagcgcagctattaaaaccgttgagaagttattaaatgtcccgattgattattatgtgacggttaatatggagggcctacagaagattgttgacgctgttggcggtgtcgatgtcaatgttccatttacttggacagatgccaataccggtggacagacattcaaaaaaggtaaagctcatcttaatggggaactggccttagcatatgctcgaatgcgtgatgaagatcctgaaggcgactatgggcggcagaaacgccaacaagaagtcatcaatcagattgttaaacaccttatgtcggtcaaatcgttgacaaattaccaaaaggtcatggattccttatcatctagcatgcggaccaacctaacatttgatgatatgatggcaattgcgcaaaattatcgcgcttcagcaactaccattgatcgtcaacagcttaaagggattggcgtttatattgatgaggctgcttatcaggtgatgacaaccgaaacgcttcaaaagatgtccaatgagctgcgtgggcagttagggcttgaaagcaagacgctaagtaattttaatactcagcaaaatgaaattaacaatgcgaatggatttgattggacagcgaacaatccggtctacactgtgtcgctcgatggtgcgacaaccggaccgtgatcaaaaaaacagcagcactctggcttcattgccaaggctgctgtttttttgtgagcgcgagtaggagcgctcaggcttctgcgactgggggcgcgtcatggtgaagcgctatactgaatattttttgcctgatgagaaatcaagacgtttttaatctggatcaggcagatccggtgccaatttgtgaccgctaagtttagcggcgatgaacccggtaagaaagccgatgagcagaaatggcacaaaatccatcccgatgccgaaccaaggaatataggttgtagcgaattgttgaatgctactgaaaatcggtagttgtgctagcccagctggtaaggcatggatggcatctaaaagcgcagggatcatcgtgaaggcaaccgtagttttatagattcgggtatttttcccaatccaaggatgcatgaggccgagcatgattaaggcaattgccagcggatagagcagcattaaaattggcgttgaataagcaatgatctgatccaacccgaaattggcaatcaggaaagcaccaattgtcgtcattggcaggaaaaagtgataaccaagttttggaaaacgatgaccgagatcttgcgagaaggatgtcacaagaccgattgcggtggttaagcaggcaagcagcgtcatcgcgcctaacaaggccgtgccaatcaaaccggtataatgtgtcatgatctggttaaacgccgtcccaccgtttgctgtgagcttagagaagccaagactgattgctcctagcaagatcaggagcatgtagatcaaagcttccaagcccattgccaaggagcctactttcgcaacagccttggcgcgagtggatgcctggtgcaagcccatgagtttcaaggctgtgatgatcgtcacaccaaagcctaacccggccagtgcgtccattgtgttgtacccttgcaaaaagccgttaatcaagttgctactcatgagcttagggctgctggtaaaacttatcgcacgaatatcacctttgatgaccagtgcccaaaagaagattactgctagcaaaatcaacaacagcggattcagcagcttgccaatataagtcgtaattttactttcgttgcgagcaagcaagaaggttgttaaaaagaaaataaacgagaaaatcaaaaggccgatttgttgttgaccttttcctaagaacggcgcaatgccaattgagtatgtgacagtagcggtacgcggggacgcgatcagcaggcctagactcgcatgagtggccagcagaaagaacaatgcgaagctatgtcccgccggtcgagcaagatcgtacatactactcgcacgggttagactgatcgccatgattgacagcagcggcaacaacacagcagatagcaaaaagccaattgccgctggtagccaagctgaaccggccagttgacccatgtggatcggaaaaatcagattgccagcgccaaaaaacataccgaacaaaagtgaccctagtgtcaaatactggcgctttgtgagtgtgggttgtggtgacattgatatccctccatttaatcaaaacgattgccgacagcgtcttgactgtaagaaggttttcaaaggagttggctaattaaccaaaagaaaagcccttaacagtcgagactgttaagggcgcgaatcacgctgtaccaccttaatttaccgctacgtcaccgtaagcggccttaccgtgtacggccagttgcctggcgatacacgattgctataatgggcgcaatcccaaccgaagcttccaaagtcacctcggcaactcgtagactactttcccaaagctaccagaggtctcttcccaccaaccgagactcgctgacaccgacaactcaggtactcttctactcatcgtttttagttgtttgttgaattgttgtttattttacgaaaaaaacgacagatgtcaactaaaaagttcagagcgcaaacaggcgcgtttagaaaccggagcataagcggcctcaagcctaaatggccgggccttggccatttagacttgggggtccttatgagcaggtttctgcgcctgtttgcgcgtttcaaaagtagagcataagcggccccaagcctaaatggccgggctttggcatttaggcttggggtccttatgagcaggtttctgcgcctgtttgcgcgtttcgaaacctccgagatcaagtagtcccttagtagtcaacacggttctaagcaaaatttgcgcaaacaaagaccctccgcactgatgcgaagggttaaagcaatctattaacctacgacttcaaccgtcgcagtcaaaactccagctgaaggaatctgtgaattcggcattgcaacatccaattgattagggttgccagctgcaaaactaccagtatcattaacagtccgataccaaactgtgccatcagataatgtaatcttcagacgggtacctttcgggaatacggagaggttagcagcaacgccgccgtaacccaaaccagacccaagcacggacggatcatagaaacttaacttgaaagtacctttgttggtggttgtttctgtcgaagctgttgtagcagcgcttgatgaagcagaagcggctgaagcagcagatgctgccgcagcattttgagctgcttgttgtgcttcctgttgtgctttttcagcagccgcctgttcagcagccgcttgttctgctgcagcctgttcagcagctgcttgttcttcggcagctttagcagcggcagctttttgatcagcaatctgatgtgctgcttcggcaatatcattcgtgccgactgtgaaggtgatttcttttttaggattgatcagtgaatgtgcattcgcctgttcaactttagcctcattgcttaacacaattgactttgcgtttacgtgactactatcgttatctgcatcggcgtgatcggcaatcgcttcgaccttttgtgaatggttacttgccatccctaataatggtgcgacactgagtaacgcgatgatagataatttaatttgcttagtaaagataaatattcactcctaatattttgaatagtcgtcgttttgttcccccgagaacacaagacgaagtatataggggtggtatgtcagtaaaataccaacatcattacaaatatactcaattcagtaatattgttacgttcgtgtaacaaacggaatgttaaaatttttcgtaacaatcagtgaacttttctcaaaaaagtgggttgagaccttgaagttactgtgatattggccaattttctaccacaatttgtgaattttttggaaatttatgggagcctaaactttaactctgatcgttcatgatacaattcaatgactggcctaaacggtgcttttgagaatcaggtataatgaagctgaactgtcaaggaggccgaattcgtggcaatgtatcgggaaaaacgttttgaagagataaaaaaactgttggcagcacgcagcgagttgagtatcgaggatattatgaaggcggttggtgtttcacgagataccgcacgccgagatattgttgcgcttgatgcgcaaggcgttgcgagacgaactcgtggcgggttggtgtctcttagctttggtcacacgattcccagctactctgcgcggctgaaacgattttcaactcagaaaacaaagatggctaagtcagcattgacgttaatcaaacctggctgcgtttatttcattgatgattcgacaaccttattaaaattgtcgcagtccattcgacaaccggtgacagtttacacgcacagtttagacaatgcgatcgcactttcagttgaagaacgtgttaatttacatctttttggtggcaaactggatcatcacgcccgtttcttctttgaaccaacgatgcttgaaacacttcgccgaatcgcctttgatgcggcatttatcggtgcaacggctattgccgaagatggggtttacttttcctatatggaagatgctcaggtgaagcaggcggcggcgttatcagcacgccgggtggtcgtggtttctgaaaccgaaaagtttcagattgaagcgccttatcgcgggctggaactcggccagattaccacacttattacggataaaaaattatcgcagacgcacaagcaatggtttgccccacagacccagtttctgctcggcgactaacaactgcttgactaaaaagggattgatacctattcaacagctaataaatgatccggggattcgcacgagtgaggaggtgcgttcatggtaaagccactcgtcaccatcattgtgccggtttataatcttgaagcctatgtggctcacggcttgaaaagcttaattgaacaaacttattctcatttgcaaatcattgtgatcgatgatgcctcaaaagatcattctccgcagatcattgcgcatttcgcagaactggattcgcgtattcaaccgattctgaagcaggtgaatcatggggtttcggctgcacgcaacagcggcttggccctagccaaaggcgatttagttgctttcatggatggcgatgactggtacgagccggactttattgctcacgccgttgacatgatggcgcgtggttgggatctcattgcgatgccgttttatcgggatgatcctgacccgcgaccggtgcatgaggctttacgcaagcctaagcaactcacgcgggaaggcctaattcggcaaatgcttcatccaattggttatattcgcggttatttatggaataaagtttttcgacgtgatgtcatcgagcaagtcaggctacgttttgatgaaagcatgacaattatggaagatgaactgttcacggcgacttacgtgatggccactcaccggtttctttacaccgggcatccagcttatcatcatgttgttcgtcgagactcagcgacccaatcgttggggatcatcggtgcggttccgcagcagctatatgcgctttggcggattcatcaagttttacgagtcgcacgacgaacagaaaaggtcactaagaaagaggcaattaagattgaacattgatcattggaggcgcgggcgttgacagaacatttaatgacttatcgccagcttaagcaaaaagcaaaagggcaattaaaagaaggcacgaatcggcgcgatttgatgctggcttatttgttaccgagtttaattcaggcagctgtcgctatcatcacgtacttgatggtcttcgccttaattcaaaaattcggcattgacaaagctttgactgatccagatggattccagaattatctgcaaagtggcaatcgtaccggaagtatgaatacgattcaaagcttggtcaatacgatgctgattcaaggggtcaattttggcgtgctagatcttgtacgccgtaaagagcgagttcaaccactgcatgcgctgctaggcctatttaacggtcagtggttctggggtgccatctcattatggatctttatgtatttcttgacgttgatggggctgtcatttttcttgattcctggaatactacttgcattgggctggcgtcaggccttttgggtctttaaagatggtcatgaaaccaatcagcgcttttcctcgatatcggcgttgatcggttcttggcgactgatgcgcggcttcaaaggcgatttattaggcctgtatgtttccatgatcggttggtatcttctggaaaacatcacgttccatttatttgactgggcgatcaatccatacttgcaattggttcacgctaactattatgaaaatcggcgcgcttacaagatcgcggctcaagcgcctcaatcatgactaaagctgaatcgttgtcgccagctgcgagacggggtatactgaccgcgatctcaacaaaatgaattgtatatcggtattagcattttgaaggtgaggcaaaagacgatggaaactgaagcctatatgacacttgccgaagtgaaagctcggcaagccgccttaaaagataaagtaccgctagatcaggctattgctgaaaatattcaaaactgggctcagtggttgcttgatgaaggtttcgagggcagttacttcacggctaagattgacggtgatactatcaacattaccgatttagatggccacccagccgccagcatcagcaccgatgcgccaagttacgtcgaagcatttaaagacagtgatcgcatgacgatgatggccattcaaaccaaactacgcaggttgattgatcggcaggctttaaagtcgcagtgagcgcgagccagcgcgtttagaaaccggagcataggtggccggttaggttcgaggttcttatgtgtaggtttctgtgatggcgagcgcgttatagaaagcaagccaaccatcaagaagcaagcctaaaagcgaaaacgaccgcagatcaatcaagctcgtttaggctcgagtcacttatgtatgagctccggtagtgacaaccaaacaacgtttcacccaaaagcaccgccagtcgctaaccattaaaaggttaacgactggcggtgcttttgagtgctttgtcagactagtaaagtttcatctgattcaatggccaatagcgccaaacaacaactgattgaatctttgacttatcaacaaatccaaaatcgcggctgtcatgggatactagccgattatcacccatcacgaagtacttgccggctggtaccttagcggatttcgttgaggaaagggttttgatgttgaagtcattggtgaatttaatcgttgaagcatcaagtccctgctgactggcccatttattaatctcgtcggtggcaaactttttgttcaagtatggttcggcaatcttcttgccgttcactgacaattgattatcttttgaactaacggtgtcacctggcatgccaatgacacgtttaatatagagagaaccaggccgatcaggggcattaataaccacgatatcgtttcgcttaggctttttgacgcggatagaatacaaacgatcgccgttttccaaagtcggttgcatcgaagttccttgcaccacatctttgctcaacacatagcgcatcagtagttgactggcaaagaagataacggcaaaaaggacaaggaattcgagcaccgtttttaaggtggaatgactgttatttttcacaatgacaccttccggaacagaataacttcagtctaccacaagccgaacgctcgcgactaggaagatcaccggtcaatttagtcgtattttgggaaaaagccgctattttcggcttgccggcataagtcgacaatttgcgcatattcggctaacatcaggcaccaacgatgcggcaaacttgtatacccgtaggcaagtccagctaaaccgccaacaagcgcgccagttgtatcggtagcgccaccttggttcacggtttgtaagacggcatcgtgatagtccggtttactttgcagtgccttaagtgtgcgtgctaacaaactgatcggatcggtagcactcccatcaggccacttatcatccgccaagactgcttgaaaagcttcaaaaattggctggtaaggctgcgtggttccaaaataactacctgctttgttgataccagtggcaatggcactcgataaatttggcgtcgcgccaagtaattcaacggcaatttgcatgtaaatgccagcagcaaccaagttttcagcgtcttggttagtaatatgaacaaaagtttcaagcaccttaacaccttcagctttttgaaaaagactcgtgtcaaacgtttgataggcgaaaaaggcgaatggcaagattcgaatgagtgccccgggttctttggcggcggcaactgattggccagttttaagtgctgtttcaatgcttggccagatatccggactgcgtttgccataaggagcatacttacccgcggtgaaccaagcttggtaagccttgattaaggcttgttcatcaaaaccgtgctgcaaggcatctaatccggctaacgcgagtccagtttcgtcagagtaggtgccagcaggttggttaaaggtgccataacccttcatggttgtcaccggtgcagcggttaattcagccgcattttgtcccttaactggcaatcccaacgcatcaccgatcgcaaaaccaacggtgccgtgaatcaagcgtgattccatgatacccatttaggttccccctctatatatatgtcgtgtcgtgattttgacattttctcaggtcatccgaggcacacttaaccttgtcaaagggcagaccacatataaattctttgatattactatggagctattatttcgttagaacgcataaaattgcaaaaaatttgctccgttgtaaaaataaccatgctgtgatagcctagcaagcagtgactattttcagaaagagcgtgaataagggagctagagccagtgtcatcattgtgtcaattggcattgaggccacctgcatgcaaactgtcacagcttgcgaagtggtttcagcaaacgctctaagcaaccaatcagctgtcgttttttatacgttttagtataggaggaatcatgagtgttcttaccgtaaccggcctgtcacagcgctttttagacaaagtgttgtaccaagatgccagttttcaagtaaatatcgaagaccaccttggcgtgatcgggcaaaatggggtcggcaagagtaccctaattaagattctgacaggggcactgacgcctgatgcaggtaaaatcgtctggcagaagcacttacatgttggctatttggatcagtatgcgaatcttgtacccggccaaacagttattgaatttttgcggaccgcgtttagtgatctctaccgtaaagaagcaaaaatgaatcagatttatgccgattatgctaatcatcccgatgacgatttactggccaaagcaggcgagctgcaacaagagcttgaagcgggtgatttttatgatctggaaacaacgattcaaactgttgctgaaggccttgggattacagcaatggggatggatcatcctgttgaagcattgtctggcggccagcgatcgaagttaatcttggcaaaattgttacttgaaaagccggatatgttgctcctggacgaaccgacaaactatcttgatgtgtcgcatattgcctggctaacggactggctccaaaattttgagggcgcgtttatcgtgatctcacatgattttgattttctagaaaatgtaaccaatgctgtcttagatattgagttcgggcaaatcacaaaatacaccggaacgttaaaacaagccatgcgccaaaaagaggccgatcatgagacttatttgaaggcttttgccaagcagcaagagacgattaagaaaactgaggcgtttattcggaagtttaaggcaggcacgcgtgccacgatggctaaaagtcgtgaaaagcagctggcgcgaatggacaaattgacgcctcctgggacgcgatccaaggcgcatttggcgtttccgtatgcgcctgttaatcgacaaatcttggtggatgttaacgatttggttgttggctatgacaagccattattacaaccaatgaacttttcggttgcaaaagatcagatcattgctttcgaaggcttcaatggtgtcggaaaatcgacgttgttaaaaacattgctcggccttttaccggcgatcagtggcaacgttgaaatagctgacaatgttgtttttggctactatgaacaagagttgcactgggatcaacctaaacaaagcccagtgcagtatttggagcaacggttcccagcgctcacgcagaaaaccgttcgacaggtcttatcacgcactgcactgaccagtgaagaggcgaacaatcctctgacgatgttgtcagggggcgaacaggctaaggtcaagttggctgacctaatgctccaaacgactaatattctagtgatggacgagccgacgaatcatttggacgacgacaccaaaaacgctttgcgtgaaggcttgcaacaatatcctggcgcagttttactagtttcccatgaagctggcttttatgatagttcctgggttgacacagttgtgaacgttgaacagttgcaagttaaagcttaacgtttcgaaaaaatcgacggggcatgaccatcaatgatgtttatgctgttatctataaaaagacttgctgctgtatgaacgttcatactggcagcaagtcttttttagtcggaattcggataattcggtttgtgtttcgaacatactgaatgggtggtgattaaacatgccagaccagttgggtataagtataagtcaaccgatcagtcacctgaacgtgcgtattctcatggccggtgatggtcttggcaaggctggcagcagttttaagaccaattggtgtcgccagatccggtaacaagtcgcttaaagttgtttgctcttcaatttcgtatgtcaaagaatgactttgaaaaggtatccgttgggctgtcagccaaactttgaagcttgtcatccgggcggggtccgcctgataaactggtggtagctgcaatcctaaaagcgaggccgcttgttcaagcaaagcgtcagactgtgcagtttgaaagttaagcaccacggtttggttagcccagttcatcagcatttttaggtcttgaggtttaagtgtcggcaactggctgacaaacaacatatcggcattaagcggcttgtgtaatttgcgccagtcacccacgataaattgagctttagtatcggcttgttgatgcatgcgctcttttgcaaaggcgagcatggcagacgaccaatcaatgagcgtcagttcctgaacccatggcatcatttgaacagcgtagcggccagttccggcagctaagtcgactgccgaatgcgcaggcagcaattgcgttgaacgcagccatgcgatgacatcgtgtgcgataggcaaacgcgacgcctgctctgccgcggcataatcaggcgcaaatgcgttccaaaaagcttgatcctctgtcatagtgcgtgcttttcctttcttgaaaaacttttttaaaaaagtggttgacttgagtgagtaaactgcgtagtatagtacgagttgtcagtcataaaaacagtttaaaccgcacagcgatttaaaaaaagatgttgacaacgagttgccaatttgatattcttagtaagttgtcgcttggcgacaaagtggtcctttgaaaactgaacaaagtttcgtttaaatgtgcagggtccttggtacttcggtaccgaggcaagaagtaacatttgcgaagtcaattcgctagaacaacaaatcgagctattcgaacagctcatatttatatgagagtttgatcctggctcaggatgaacgctggcggcgtgcctaatacatgcaagtcgaacgagttctcgttgatgatcggtgcttgcaccgagattcaacatggaacgagtggcggacgggtgagtaacacgtgggtaacctgcccttaagtgggggataacatttggaaacagatgctaataccgcatagatccaagaaccgcatggttcttggctgaaagatggcgtaagctatcgcttttggatggacccgcggcgtattagctagttggtgaggtaatggctcaccaaggcgatgatacgtagccgaactgagaggttgatcggccacattgggactgagacacggcccaaactcctacgggaggcagcagtagggaatcttccacaatggacgcaagtctgatggagcaacgccgcgtgagtgaagaaggctttcgggtcgtaaaactctgttgttggagaagaatggtcggcagagtaactgttgtcggcgtgacggtatccaaccagaaagccacggctaactacgtgccagcagccgcggtaatacgtaggtggcaagcgttatccggatttattgggcgtaaagcgagcgcaggcggttttttaagtctgatgtgaaagccctcggcttaaccgaggaagcgcatcggaaactgggaaacttgagtgcagaagaggacagtggaactccatgtgtagcggtgaaatgcgtagatatatggaagaacaccagtggcgaaggcggctgtctggtctgtaactgacgctgaggctcgaaagcatgggtagcgaacaggattagataccctggtagtccatgccgtaaacgatgaatgctaggtgttggagggtttccgcccttcagtgccgcagctaacgcattaagcattccgcctggggagtacgaccgcaaggttgaaactcaaaggaattgacgggggcccgcacaagcggtggagcatgtggtttaattcgaagcaacgcgaagaaccttaccaggtcttgacatcttttgatcacctgagagatcaggtttccccttcgggggcaaaatgacaggtggtgcatggttgtcgtcagctcgtgtcgtgagatgttgggttaagtcccgcaacgagcgcaacccttatgactagttgccagcatttagttgggcactctagtaagactgccggtgacaaaccggaggaaggtggggatgacgtcaaatcatcatgccccttatgacctgggctacacacgtgctacaatggatggtacaacgagttgcgagaccgcgaggtcaagctaatctcttaaagccattctcagttcggactgtaggctgcaactcgcctacacgaagtcggaatcgctagtaatcgcggatcagcacgccgcggtgaatacgttcccgggccttgtacacaccgcccgtcacaccatgagagtttgtaacacccgaagccggtggcgtaacccttttagggagcgagccgtctaaggtgggacaaatgattagggtgaagtcgtaacaaggtagccgtaggagaacctgcggctggatcacctcctttctaaggaaacagactgaaagtctgacggaaacctgcacacacgaaactttgtttagttttgaggggatcaccctcaagcaccctaacgggtgcgactttgttctttgaaaactggatatcattgtattaattgttttaaattgccgagaacacagcgtatttgtatgagtttctgaaaaagaaattcgcatcgcataaccgctgacgcaagtcagtacaggttaagttacaaagggcgcacggtggatgccttggcactaggagccgatgaaggacggaactaataccgatatgcttcggggagctataagtaagctttgatccggagatttccgaatgggggaacccagtacacatcagtgtattgcttgtcagtgaatacatagctggccggcggcagacgcggggaactgaaacatctcagtacccgcaggaagagaaagaaaactcgattcccatagtagcggcgagcgaagtgggaagagcccaaaccgagaagcttgcttctcggggttgtaggactggacattggagttaccaaagtccgacgtagtcgaagtcagctggaaagctgcgccacagaaggtgaaagccctgtaagcgaaacgtcgaaccctccgtccaggatcctgagtacggcggaacacgtgaaattccgtcggaatccgggaggaccatctcccaaggctaaatactccctagtgaccgatagtgaaccagtaccgtgagggaaaggtgaaaagcaccccggaaggggagtgaaacagttcctgaaaccgtgtgcctacaattagtcaaagcccgttaatgggtaatggcgtgccttttgtagaatgaaccggcgagttacgtttgcttgcgaggttaagatgaaaagtcggagccgtagcgaaagcgagtctgaacagggcgaatgagtaagcagatgtagacccgaaaccaagtgacctacccatgaccaggttgaaggtgtggtgaaacacactggaggaccgaacccatgtatgttgaaaaatgctgggatgagttgtgggtagcggtgaaattccaaacgaacttggagatagctggttctctccgaaatagctttagggttagcctcggaggatggatcatggaggtagagcactgtttgaactaggggcccatcaagggttactgaattcagataaactccgaataccatcgatcttactccgggagtcagacagtgagcgataaggtccattgtcgaaaggggaacagcccagatcaccagttaaggtccctaaatttatgctaagtggaaaaggatgtggcgttgcacagacaactaggatgttggctcagaagcagccaccatttaaagagtgcgtaatagctcactagtcgagtggcactgcgccgaaaatataccggggctaagcataataccgaaactgtgggtgcacccgtaagggtgcgcggtaggagagcgttctaagggcgttgaaggtcgatcgtgaggacggctggagcgcttagaagtgagaatgccggcatgagtagcgaaagatcagtgagaatctgatccaccgtatgactaaggtttcctggggaaggctcgtcctcccagggttagtcgggatctaaggcgaggccgagaggcgtagtcgatgacaagcaggttgagattcctgcactagtttattttgtttaagcgatggagggacgcaggaggctaaggaaagcgcacggctggaaatgtgcgcccaagcagcaagtctgacagcgagtgaaatgcttgcagtcttaaggacaagctgtgatggggagcgaaattatagtagcgaagttcctgatgtcacactgccaagaaaagcttctagtgagaaataaactacccgtaccgcaaaccgacacaggtagtcgaggagagtatcctcaggtgagcgagcgaactctcgttaaggaactcggcaaaatgaccccgtaacttcggaagaaggggtgctgaccgcaaggtcagccgcagtgaataggcccaaacaactgtttatcaaaaacacaggtctctgctaaatcgtaagatgatgtataggggctgacgcctgcccggtgctggaaggttaagaggatgagttagcgcaagcgaagcccagaattgaagccccagtaaacggcggccgtaactataacggtcctaaggtagcgaaattccttgtcgggtaagttccgacccgcacgaaaggcgtaatgatttgggcactgtctcaacgagagactcggtgaaattatagtacccgtgaagatgcgggttacccgcgacaggacggaaagaccccatggagctttactgtagcttgatattgagtgtttgtaccgcttgtacaggataggtaggagccgtagagatcggaacgctagtttcgatggaggcgttggtgggatactaccctagctgtatgaacactctaacccgcgccactaatcgtggcgggagacagtgtcaggtaggcagtttgactggggcggtcgcctcctaaaatgtaacggaggcgcccaaaggttccctcagaatggttggaaatcattcgcagagtgtaaaggtataagggagcttgactgcgagactgacaagtcgagcagggacgaaagtcgggcttagtgatccggtggttccgtatggaagggccatcgctcaacggataaaagctaccctggggataacaggcttatctcccccaagagtccacatcgacggggaggtttggcacctcgatgtcggctcatcgcatcctggggctgtagtcggtcccaagggttgggctgttcgcccattaaagcggtacgcgagctgggttcagaacgtcgtgagacagttcggtccctatccgtcgcgggcgcaggaaatttgagaggagctgtccttagtacgagaggaccgggatggacgttccgctggtgtaccagttgtgccgccaggcgcatcgctgggtagctatgaacggcagggataaacgctgaaagcatctaagtgtgaagcccccctcgagatgagatttcccattcctatatggaagtaagacccctgagagatgatcaggtagataggctggaagtggaagtgcagcgatgcatggagcggaccagtactaatcggtcgaggacttaaccaagtaagcgtgcaagcaggcgcaggtttctgcgactgcgaacacgtttcgatgacaagtacgttaggttcaaggcagcaattaaacaatgatagccagttttgagagcgcaaagttctcataagtgtggtggcgatagcaagaaggatacacctgttcccatgccgaacacagaagttaagcttcttcacgccgagagtagttggtgggaaactgcctgcgagggtaggaagctgccacgctaagttaggatctggtcattgaccggatctttttttataccttgataagtaagtggcagtcgtgctaaattgcaagagcaagcatggaaggggatcacatcatggcaattgaggcaacgaaagataacttgaaggcattgacagctgaaggcacggttgtcgttgatttttgggcaccgtggtgcggcccttgtaaagtgcttgatccgatgttaacggccctagagcaagaactgccagcgcttaaagtggttcgttataatgttgaaaaagatcatacgttgccgagcactatgggcattatgtcagtacccaccttagtcatttatcagcaaggagaggcgcgcgaaaaagtgacaggtgtttaccctaaagacaaacttaaacggtattttgaacagaaacttgaggcgtaggtatgacacattcagttgagcgtcaggatacagcaatccaaaatcaagtattggcaacatgcttgcttgctggacgcattatgattgaaggcggttcggaaatgtatcgcgttgaagatacgatgcgacgaattgctgtgaatgccggtgagccacaaacgttggtgtttacgacgccaaccggtatatttgctagcatcgaaaatcagccgtatattcaggagcggccgattagcaaacgatcgattgatatggaaaaagtgacgcgcgtgaatcaactctctcgttcgtttgcggctgatcagattgatctagatgaattgcacgcggcattgatcaaactggatcagaacaccccttttttcccgatttggttgcaggtggtgagcgcggcagttgtcagcatgacactcatggtgttatttgctcaacagtatgactggcttgatatgcctttggcagctgcggtcggtgcattgggctttctagttgatatcaaagtgaatgcagtgaccaacattcggtttattagtgaattactgggcgcattggtcgttggcttaactgcgtggcttggggtcaggttaggcctaggacacaacctggactttattattattggagcgattatgccgcttgtaccgggggtagcgattaccaattcgattcgcgatatgctggcgggacatttgctgtccggtatggcccgcgggatggaagccattttgagcgcttgtgccatcggtgttggtattgctatgatcttccggttcttctaaaaacataaagggggcggcatcttgcagtggtggtttgctttattagttcaacttttgttcagttatttggcaacggtcgcttttgctatcattatcaacgtgccgcgcaaggcgttaaatttggctggttgggccgggatgatgggctggttggcctactggttgttgatggaagtcggtagtggccggatgatggccaatttagtcggcgcttttgtcattggcttgtgtggtatcttttttgcgcgctataagaaaatgccggtcatcattttcaacatcccaggatttgtacctttggtgccaggcgctgttgcttaccaagcagtacgagcaactgtcttaggcgatctggacggggccttgcagtatgtcagtcgagtggtcatgatcgctggtgccattgctgtcggttttatgttggcgcagctgttatcagaagtgttgtataaacgagctgttttaaaaccgaaaaagtgatataatcatgttatgcgatgagtcgagtaagcacgcaacttgtgctgaaagctgcagctgactggttaaaagccacccgccggatttgtggggtcagcgatctcaaggttgtggagccagcgagatcctatccaagtcaacttgggtactgcagaaaaaggacgtttttgcctttaagggtaagaacgtccttttttatttgcgatttaactagactgactacaaagacaaactctttttgctctaataactttattagaatagagggttgacttagacatgcatttcctctaagaaagttattgccaggcgttagattgtcatcaaaataaacattcagcaaattaccaataaaaatttctgagaaaataagttgactttccttggtaatcatattaagattttaaccaaccattaatcttaactaggagggcgtattgatgtcattgatgtgtatgcaaagaaaaacaaatcgtaactgtcattacgctcttttagccttgttgttgatgccagggacccgaccgaattgatcgtttaagatcaacgtgttgagccccgttttcgcattggcgatggggcgtacgattagcacccattcgtctgaatgggtgcttttttctgttaagaatcaatgagatatagtcataagcaatataatgagggggaaccaagatgaagaagcaaattgtcaaagcaattatgagcgctggcgtcatcgcagcttcgatgctggcattggcaggctgtgcgacaaagagtgccacgagcaaaggaaatacggcaggtaacacgattaaaatcggcgtgaacatggagttgtctggcgcggttgctggttacggcgaacagcagaaacaaggcattgaattggccgtgaaacagattaacgctgcaggtggtattaaggtcggaaatactaagaaaaaaataacggccgtctatcgtgacaacaaatcgtcaacgagcggcgcggcttcagtagctgcacagctggcgaatactgacaaagtggttgcgatagttggaccggcgacaaccaatgacggaacagcctctattccaaacgtgaccaaggcggccgtaccaatggtgagtcccagtgctacggatccaaactttacacttcagaaaaatggcagcgtgcaaccctacgtttttcgtgcttgcttcaataacgattttcaaggagaccatgcggcgatatttgccaacgataccttgaaggccaaaaacgtggcgattattgctgacaactcgactgattacggaaccgggttggctaaggcattcaagaagaagtttaaaggtaatatcgtgacgactcagtattatcaatcaggtgataaagatttcaatgctatgctgacaacgatcaaaagcaagaaaattgatgccatctatgcaccgggctattattcagaattaggcctcgtcatcaagcaagcgcggcagtcaggcatcaaggtaccgtttattggtgcagatggcatggccgatcctaagttggcgcaaatcgccggcgctgcgaatgcaactgatatttattacaccacgccattttcgacgctgagtgctaacagcagcaagctggtgaagaactttatgaccagctttaagaagcagtatcaaacagaagcaccaacgttctcagcacttgcctacgattcggtttacatgatcaagcaagcgattgaagatcagaaggctgccgattcagccagcattgccaagggtttggccaagatcaaaaaaatgcctgctgtgacaggcaccacgaccattgatagtcaccataatcctgagaagccgctggcggttgagcaactgacacaaggcaaaattgccaaagtctataccgttaagtaaatgactgcggaagctttttatgaggagatcatattttgcaaaccttgatgcaacaaatcattaatggactctcacttggcagtatttacgctttactcgcgctaggttataccatggtttatgggatcatcaagctgattaactttgcccatggtgatatctatatgctcggcgcgttttggggctattatgcgattaattacctgcacttcagttttgttccagcattgttgtcggcgatggtgatggctgcactctcaggcgtcttgattgaatacttggcgtatcgtccgttgcggaattcaccgcgaattgcggcgttaatcactgccattggcgtttcctttttcctagaaaatggcatgtcgtttctattcggtgctaatgcccggaactttccacaggtcatcaccactaaaacctaccagatactaggggtcgatgtttcaaatgtgcaactacttattttgttcacctccttggtactgatggtgatgctgcagttcattatcaagcaaacaacgatgggcaaggcgatgcgggcggtggcagttgatccagaagccgctcaactggtggggatcaatcccgatcacgtcatttccttcaccttcgcattaggatcagcactggctggtgcagcgggtgtcatgatcggcttgtattacaattcgattgatccattaatgggaatggtgccgggaatcaaagcgtttgtcgccgcggttgttggtgggatcggatcggtcccaggagcggctgtagggggcttcttgattggcttgctagaaactggtgttcaggctgtgggcttatcggcctacaaagatgcggcggtttactttgttttgatcatcatgctggtcgtgttacctgctggattattcggcaaacgtcaacgggagaaggtgtgagcctatgtttaaaaatatgcgcagtaagctcatttggctcgcgacgatgattgctggctttgtcttgatcgacattggtgaattaaccggcgtcattaacgggtttatcgaaaatgcgctggtcacaatcggcattaacattattttggcagtcggtttgaatcttattatcggattttccggtcagttttcgcttggtcatgctggcttcatggcgattggcgcttatgccacggcgatcatcacacaaaacatctcaacgccgcttgggttttaccttgctatgctggtcggcatgatcgttgcgatcattgccgctttgattgtcggaatccccacgttgcggctgcgaggtgactatttagcgattgccacgatgggcgccgctgagattatccgagtcattattaataatttgaaaatcaccaatggccctgctggtatgtttaatattccgcctttggcttcgtggccaacggtctatatcttaatgtgtgtcactactgtgatcgttgtgaacttcattcacagtcgggcgggccgcgcggtgatggccattcgtgatgatgacattgccgctgagtcgattggcatcaatccgaccaaatggaaactggcagctttcgtgctcggcgctgccacggcagccattggcggttcactccatgcgagttacttgcaaacgattgctcccggagattttggcatcatgaattcgattgctttgctgattatcgtcgttttaggcggggtcggtagtatcactggcacttttgtcgcggcggttgtgttgggcatcatcgatacagtgctgcagaactttggcactttgcgaatggttatctatgcgctggcactcattttgctaatggttttcaaaccagctggcttattaggccattatgagttgtcgttcaagcgcaagcgccagattcggaaaggagcagcatcatgacgcaacaattggtaattgatcacgtcagtaaagtttttggcggtttaaaagccgtcgcggatgtcacgatgacgatcgaacaagggacactgattgccttgatcgggccaaatggcgctgggaaaacaacattgttcaatatgttgactggcgaatctgggccgtcgtctggcacgattaccttgtatacggctgatggaccagttgatattacgaaaaagaaagcctatcaggtggcgaagctcggtgttgctcgaacttttcaaaatattcgcttgtttggcgccatgacggtcaaagaaaatgttttagtggccaggacacatctttatcgtgaaagtttcattggcacgatgctgcggttgccgcagttttatcaacaggaggcagccgtagcaactgcagccgacgaattgttagatttttttgagcttgctgatgtggccgatgaaccgactgctagtttgccatatggtacgcaacggcgggtggagatagtgcgggcagtggccacgaagccgcaactgctgtttctggatgaaccagctgccgggatgaatccagaagaaacggcagatctggggcgtttgattactcggattcgtgagcattttggcatcacggtggttttgattgaacatgacatgtcgctggtgatgaaattggctgagtcaatttatgtactcgaccatggcgccatgattgcttctggaacccctaatgagattcaaactaacgcgcaggtcattagtgcttatctgggaggtgaaaaccatgcttgaggttaaacatctcgttgtgaactatggtggcattcaagctgtcaaagacgtcagctttagcgttcaaacgggtgagattgtcgccttgattggcgcaaatggtgctggtaaaagtacgattctgaaaacaatctccggtttgttgcgaccacgttccggtatcattgactatgaagggcagaaaatcaatggcatggcggcagccaaaattgtgaagcaaggcatctcgcaagtgccggaaggtcgacatatttttgctggtttgacggtagccgaaaacctgcaaatgggtgcgtttggactgaaggataagcaagctgctggcgaacaaataacgatggtctatgatcgttttccggtgttgaaggagcggcaacatcaagatgccgcaacactttccggtggtgaacagcagatgttagccatggggcgagctttgatggcaaagcccaaattgctgttactcgatgagccttcgatgggcttggcgccgattttcattcaagagatttttgacattatcacgaaaatcaacgcgcagggaacaacagtgttgctgattgagcaaaatgcacgccaagcgttggccatcgccgatcgcggttacgttttggccagcggcacggtcaagctgaccgggacaggcgaagagctgcttgccgatccggctgtgcaggcaacttatctggggatgcaagtgccttagataagggaacagttaacaagcgtcaaaaggccaagccacaatatttagggcttggctttttgtggttattggcgacaaaagatcggtacaaagacaaataaacaggcactgacagatgcgtcagtgcctgtttattttttgtctgtatcagttaagtgaggttggacggcccttttgtcttacgatcgtttaaggattctgtccggtatcgcctggtgcttgtccgacgcctcgaccactaccgccttgccctggccgaatgccctgttggttcggtgtagcgaccatgtattgactgatcaagttcacaatctgtcgattttgcggtagtgagctgtgacccgcttcgtcgccggaaacggtgatctgggtgtagtgcgcgacctggttttggaaaatatatttaccagcttccacactttcgattgggacggtgccatcgccgtccagattttcggtaccagcaattgagtagacagtcaagctgctaggcaacttgttgcggctagtaatgagatcgttcagcatttgtgttcgattgtcaggattgctttcttcaaggttgtacggcgttccaatggtcatgagtcgtgtcatccgcacatcagaatcgctgtaatacttttcgagaaaaagggtgaagatcaagccgccattactgtgaccaataccacgaaaacgattgaaattataggttttcgccaattgcttaaaggcaatgttgaaccacgccgcctgtttcttgatgttattataaccatctttattgttttcgaatgcgacaacgatgtacggctcggtatcacgtgctgcgattttgccactgtaagttagtgtcccattcgttttgaccgtaattttcagcaaactatggcccgttgtttgggcgtttagctgggtgatcaaggtgttgaaccgatcttctgttgctgaactcccaggaatcaaaataatcggttgcatacgggagttgtgaacaacgcgagcagatttaacgttttgttccatccagctggtagcggggagcatgatagccgttaccgccaagacactgaccagtaacaacagccactttcgccagtgtttaatcatgatgaccaccgacctttgctgattcaagattgattgtttctgctagtcgcacaaatgggatatagataagaaccgagattgctaagcagaggatagccacgagaagcgatacccaattaccattggtgcctaggaaggctgccaacggtccgggcgttgtcgttggaatcgtataaactgacggcggcataagacgcaagcggatagctgcccatgcaatcgtcatattaactagcggtgcaatcaagaacggcacaagcaaaatagggtttaacatgactggccagccaatcatgatcggtgagctgatattgaccaagctcggcaaaagcgacatgccagctattcggcgtaatggccgggttttggcaacccaaagtgtcgcaatgatgagggctaaggtcatcccaacgccaccgaaactcgcgaagggatggtaaatggtgccaatggtgatcgggttgggcacattgaacaaattgttgtgctcaagcgcataattcaaattggcagtgctggtcgtgctaccggcttgcactgttaacggattgatcggaccttcaataccagcccaccacatgagggcattaatggtggtgaccaaggccaatcgaatcgacacgtgactgaggctggaggcaggtatctgaaatggaatgtagaaaagcccgatgaaaccttctgtcgagatgcggctgaggctgtaattgatcgccacactgatcactagaatcacgacagtaagccaggtgccacgcagcccacggtcaaccaaggcagcgattgtataccgatgcgttggttgaccgtgggctgcacgtgtgaagcggaagagccaaccgataagcaagccgaaaaagatagcaataaacaaaccacgataaccaaaattattcatttggaaaggtgattggccattgcgtcgtgaatccaaattaagaatcataaatgccccgacactcgttaaggctgccaaagaatcatctttgccataagatcgggcaataaatttggcaacgaaaaacgccgccataaccgccatcagatcgagtgtcactgtttggatcgacatcaaaatggtgcggatctggttatagtaaggaatgacggtgtcaagatgataaatgactgcaaaaaagccatttcgtgaaaacacactctgcgtcaacatttgagcccaagcaccgaccagaataaacgggaaaatgacggcaagggtttgttggagcgcgcgataaatgcgggtgtgtcgcaaccgaacgctattgttaacgagcacgggcagcaatctctgcatcagattgctcatggctgccatctcccttttcaatttttttaatggcgcattatcaatgctattctaacaaatattaatatcgccgagtagttttcgtattgaaaagaaagttaaaacaatgatgagacgccttatgaaaggtcgagttttacgatttctgctttcgataggcctccatcttggcgtggaaagttgcttccgtcacgccataggccgcaaatgttaccgcattagcgccagcttcgatcgtggcagtgatctgctcatcggttttaccgccagaagcaataatcgggaaattcgggtgcttgctgtcaatggccgcacgaacttcggccacaagattggcggtttctttgccaccagcaatgttaaaggccgcgacaccggcatcaattcgggcgttaagatcatccatatgacggacaatggtatagatcgttggaacgtccaccacacgattgacattgatgagcgtttcaatcggagttggcgcatttaacacaacggcctgggcaccgctttcttctgcaaaagcgccaatggttgcggctcgcaagcccttggttagcccgccgccgatgccagccagaatcggcacgttagccaccgttgctacagcttggagaatgcgcgtattaggtgtccacggatagacagccagaatcgcatcagcatcgcaattcgcgatcacagcgacgtccatggtatagatgatactgcgaatttttttaccaaaaagcgtaatgccactggccgctttaatcgctgaaggtgcttgaacaatatcagtgcggagcttagaagttaaattcgggggcatgttcgtcatggaagtacctcactttcaagaaacaatttgattaactttattataatggatgagattaggtgaaggcgagaaggacacctttatgactgttttgctataggtcgggtgtcccgaagccttcgagcttgctttaatcaactgccttgccaaaacgcatttgcaagccacaacttggcttgacggtacgcgtactcatgatctattcaaccctttctatgcacgattaaccataccatggtattcttaaggcaatctgatgaatgcgtcatttggtaaccgcattcatcttctgcagataagataagctttttggctgcgatcagaaggctatttatgacggaggcgtaaaaatggcaaaaccattggcaaagtacatcgatcatactttattgaaaccggatgcaacacaggatcagattgatgaagtattggcacaagcaaaacagtacggttttgcatcagtttgtattaatccctattgggttgttcgggcggcggctagtttgcgcgacacggatgtgaacgtctgcacggttatcggctttcctctcggggcaaacaccacccagacgaaggttttcgagactggacaggcaattgacgaaggtgctcaggaaatcgatatggtcctgaatattggcgaattgaaggcagggcatgacgatcatgttcgtgctgacattcaggcagttgctgatatgacccatgctaaaggtggtttgctaaaagtgatcatcgaagcggttttgctcacggatgatgaaaaagtcacggcttgcaagttagcagctgcggcgggcgctgattatgtgaaaacatctactggatttgcagcaggcggcgcgacggtgcacgatgtcgctttgatgcgcaaaacagttggcgataaactaggggttaaggcagcgggcggcattcacacttatgctgaagctaaggcattgattgatgctggcgctgatcgtcttggtgccagtgcagggattcaaattttgaaggaagcaggcgaagcataagatggcatttgatcgcattatcacgattgtgttggattcaatcggtattggtgaagcacctgacgccgctaagtatgatgacaccggcgctgacacacttggtcatattggtgcctattttgatggtaaactggctttgccaaatttgcaggccattgggttgggtaatattgctcgaccaacaccaattgctggcgtgacggcgttaggtagtcccagcggctattttggcaaaatggccgaaatttctgcaggtaaagatagtatggatggtcattgggaaatgatgggtttgcctgtgacggaacctttaggctattttcccaaaggttttccggctgagttgattaaacaaattgaggagttttccggccgtaaagttgttttgaacaaaccttattctggcacagaagcgatcaaggactatggtgagcaacagctgaaaactggcgatctgatcgtgtatacctcaggtgattcggtgcttcaaattgcggcgcaaacggatgtcattccacttgaagaactttatcgcatttgccgttacgttcgcagcatcacaattgacgcaccatatcgcattggtcgggtgattgcacggccatatgtcgggacagaccccactacgttcacgcggaccagtgaccgtcatgattacacacttaagccagataagccgacagatcttgatcgccttcaaggtgctggcattgcgacttatggcattgggaaaattaacgatattttctctggccaagggctagatgacggtgttcataccactagtaatgttgatggtatggaaaaaacaattgaagcagtcaaatcggaccgccgcggatttattttcaccaatttagtggactttgatgcgatgtatggccatcgccgtaacgcgcaaggcgacggggatgctttgatgactttcgatcgacaattgggcgacttaatgacagtgctacggcatcaggatctattgatgatcacggcggaccacggaaatgacccaaccttccgcggaacagaccatacccgcgagtatgttccgttgctagcctacagcaagcaattgccgggtaatggcgatttaggtattcgttcgccattttcggatcttggtgccacgattttagataattttggtgtcacaggtaatcaagttggccagtcgttcttaaagctgcttaaataaacccacattttgaaggagaatcattgtcatgagcacacatattgatgccccaaaaggagccattgccgacgtcgtcttattgccaggtgatccattgcgagcacagtacatcgcggaaaactttctggacaatgcccaacgttacaacacggtgcggaatgcatttggattcaccggcacgtttgaaggccggcgcgtgtcggttcaagcgaccgggatgggcattccttcgatctcaatttatgttaatgaattgattcaagactatggggttaaaacgctcattcgcgttggcacagctggcggcatgggcgaaaatgtcaaagttcgcgatgttgtgctggcccaaggatcttcgactgatagcagcattatcttgaatacgtttggcgccgggctttattttgccccactagccgacttcaaccttcttcgtgaggcggcaaacttggcagatactagcgcaattcgctatcatgttggtaacgtgcttggcgaggatcgcttttataacgatgagatggatcgtcaaaaactcattgattatgaagtgctggcgactgagatggaaacgccggcactttatctacttgcggctaagtaccatgtgcacgcgttatcgatcctcacggtttcaaatcacttggttacaggtgaagaaacctcagcccaagagcgacagaccagctttaatgacatgatcggtctggcactcggtgttgccaaaacagttcctgatcgttagataacgcatgaaatctagttataccaaggctttggcgccgtgaattttacagttgaaatatttttttaatgtgcgtaccagtaggaaacgtgttattctgtatatggtttcttaagaaatggtaaacgcaagtaaaacgcaatttttgaaaaattcagttttggattggaggagtacatacatggtagatgcaaagaaagtattgtcagttacggcaggattcgttggtgctgccggtttggcaactttagctaccggcgctaatactgtttccgcttcaacggggacagtcaattacaaatcgggtgtgaccaccgtatggaatagtccatcatggcatcaagtaaaacgctatgtgacttttggtgacaaagtacaagttctaggtcaaaaagttgaccgaaacggtgctacttggtataaagtcggcgacaatcagtggatccctggcatttatttgaattttgacggcaagactgtcaccgttcaagcaccagaacaaactgccagtcaggcaccggttagccaagcgccagctagccaagcacctgcaagtcaggcacctgcgagtcaaacagccgcacagcctgatacccagacagcaaacattcagttatatgttaaaaacattggttctgcagtcacagtttgggcaacaccagcgtacagtcaggcaactggccagtatctggaaggcaaccagacgttgacggcggttgcccagttgcaagccaatggcgaaacatggtatcggttagcaaatggcggttacgtgccagaacgttttgctagcacaacacctgcaccagcaccgcagtcatctgctgcaacgagtgttgcggcaccgactgcgcctgtatctgatgcaacggcttcgaacgcagctgcttcaaatgccgccgcttcggatgttgctgtctccagtgctgcagcgtctagtgccgcggcttcattagctgccgcttcagaagctgctgcggttgcgaatgcttctagcgctgctgcatcttctgctgccgctgtagcgagtgctgccgcagcatccagtgctgctgcagagtccagtgctgccgcatcgaaggctgctgctgattctagcgctgcagctgtgcagactacgacgcctgagtccagtgctgcgcctgcaacgacacaggttgatgcaactcaggaacagcaacagcaggcagaaccaagcaatacggtcaataccgaggaaacgacaaataacgcgacgccgactcctgcaccaacgccgacgcctgcaccaaccccagccccagctcctgttacgccgtcacgtcaggcaaaaattcaggcggttatctcaattgctgaacagcaaattgggaaaccttatgtatggggtggcaagggtcctaacagctttgactgctcaggcttgatgtattatgcctttttgaacggcgccggtgttaacatcggtggttggacagtgccacaagaatcttctggtcagcaagtctcactgagtgcacttcagcctggtgatttgctcttctggggcggacatggtagctcttaccacgtagcgctctacattggtggcggtacaatgattcaggcaccacaaccaggtgaaaatgtgaagtatacggcattagcttacttcatgcctgattttgctgttcgtccttcactataaggataactaatggctaaaattaaattggaacattctcgcgagagggtgttccttttttttgctttttttcattccggggcaaaaaatatcctgcattcacgggatatccagtacgattcaacgattgatagctatcctaatcgtcatagtccggacttttgatcagttcagatggagcagtttttgtagaggatttaaagatgtattttgcaatggatggcgaaatggtcttggctaaggtctgtccccaattttgtgagatctccagtaacgcaacatcatgtggttgagtcgagatcaatgacagaaaatgtccggttcactagcgattttgtccaagctgttggtatgtaaagctataaattgttgccgagctttttcggcacttccttagattgatctgctgtttgaatatttggtccctagatagacttgcagggttggtagctatcctatagacaatatacgatgggcggccgcttttttgttgctttaaattttaacgttgataattgctgctttttcgtcgctagcagtgtcaaaaatgccaaataacgacgaaaaaagcggattttgctacgtttatttttaaacggtattgaacgacatctctctaagcaagtgagatacctttagatgcgtcagcttttttggagtgggggataactgaggacaatagaaagctgaaaagcacaaacagtgcactcaataagtgtgcactgcgttttggtctggtgagcatcatgcaagcttttgtagctttagctcaatgattacttaacccattttgcgattgactgacccacttggtacccagcatcaaagataccggtgaagatacctttcatgatgacctcgactgacaaatcgccgccaacaaccgacacttgttctgtgtaggtaagttcaggaaattgattcaaagctttttgattcattgtggcttcctccatttatcgtgtctatttcaaataactagctatagagctacctttttgataacccacatgaaattaagtttgcaagactcccgtgccaaactgccaaagcatcaagatcaaaagacgggcaataatggccaaagggagcttttttgcgagaacgcgaagtacgaattgctttggcacgttcaccacttatttatacagttgcaggtttcttttcttgcgtcatgccatccgtaaagccagagaagacaccggacagaaatacagtgaggcttccaatgatgacgccggtagcgacaacaccgatgccgccttgactttctgctaattctgaatcatcgatgcacgaaaagtttttaagcactaagttattttccaacataagtttcagctcctagtattttttgaatgtttcggcttactacaaccacggcgattgtccataatgcccagcagtgcggaaaccattgctgaggtagcatcggcaattgtcatgtagtgtcaccccttcgtttgggatagtacaagaacacatatgaaaaagtgtgcttagtatgtcacggttgaaggggtcaaaaatgatttctctttcctctccttcccgctaattgccgtagatctgagacaaaactatctaggtgctagcgaccctgtacataatatacaagtattaggcgatttataggcagcagagaaattaacgttgcgttattcgggcttttcgtggcttatttagccataagtttcaaaatgcgacgaaaaaagacgattttgcaacgtttattttttgctgttgattaatatgtttgaaaatagacattaacggtaggattaaaaattactcaagattaaaaacaactttagccacattcagtgattaaaatcgaaaaaaatcaccagtttctgaattgtgatcgcggctcagatagcacttgttggccggcagtttcaaggctattttgtttggctgcttcaagctcaattttcgtgggcaaatagtttcatgcgcttgatcagacgcgaaagtgactgggtaacccgtgcattgcaaaagtcagggaaaaattttcagacgtcaagcaaaaacgaatgacctcctctccttatacaggggaaatcattcgctttttggtttttatcgggtaatgactgggatttatgagtggggcacggcaaagaacttttttgcccttgcgctttttcccgggttattcggaacctaacaaatcataaattccaagaagaaatagtagctcttagatgattgtttgcaattcgaatggattaagctaccggtgttttttccatctcttgagctttggcaacggctgccatggcgacggcgttgacccagttgattggctggtcaaagtttggctggaagagcatgtcgaccatggccaatgtttcgatcgtcatgtgtgtttgaatcgctaaggagatgacattggcactttggctgatgtcatgcttggaaaagaaggccccgcctttgacttcgtgcgttttaggatcccaagtcaagctgcaaagaaccggcgtggtggtcagcataaaatcaggacggtaatcctgctcaatggtcacgctggcaacctcaatgccacgagctttggctccttcagtggtcatgccagaggcagcaatggcgtgttcgaaaagttcaaccgctgaacttgattgggtaccgagatacttttcggttggtttttcaatatttttgccgactaaaataccttgacggacggcattggttgctaacggaatgtagtcatttttgcctgtcgggttgtaatgcacggtagcagtgtcgccggctgcaaaaatagcaggatcgctagtttgcatataggcgtcggtgatcacggcaccatttggcaaggtctccaaatggtctttcagcagttccgtgtttggtcggaaaccggtacacaaaacagcgatatctgctgtatagctgcctttgtcagttgtaacggtcatctcaccatcagtgccttggtcgaaaccggtgaccatctcacccagtgctaaattgacgccatgatccgtataaagtttttctactcgatctgtaatggtagcgtcaaagtttttcgccaacacacgtggcaagccatcgatcaaggtaacttgtttgtcagttagtgcatactgttcggcaagctcggcgccaatatagccggcaccgattacgatcgcacttttaatggtcggagcaagcgcctttaaagccttggcatcatgccaatttttgcaaagatgaacatccgtgtcgtgaatgcccggaatgtttgggacgatcggcgtcgaaccagttgtgtaaaccaatttgtcatatgtatcagtggtcacgttgccggttttgagatccttgacttcaaccgttttcgctacaggatcaatcgccaaaacgtcatgctccatttgcatgttagcacccaacgcagccaatgcttcaggactggaataaaacattttttcggggtcactgacatgatcaccaacccacaaagcgatgccgcatgatagaaatgacagattatgattacgttcgtacacggtgacgtcataatcaggatgctctgtcaggatttgctgtgtcgcgaatgtaccggcatgggtcgcaccaataacaagaattttcattagttaaacactccttcacaaattgataaccttttcacaaagaaagtgtaacataattggttgtctatgactagattgtccacggctaaaattgtgaaatatttattaagaaacgctttcaaaaatattgcaaaaacgctagcaaaaaatcgattgccagctttgcgacaatcgatttttcgttaacgttgagttgatgtttgtaaccagcgtccgataagttcgagatgatgcataagctgatatttacgaactacaccaaggccaggaaaatgatggcgattggccgcatccatgaaggcggcagtcccagttgtttgggcatcgagatgaaacggcagccaagctgcgagttgggccaagacttcgaaaaacttagcttgcggattagcaaaatcatcattattgaccgacacaaaatgatgtaatcgtaacgtgccatcttcggcggggtaaacaagatggatcgcgacggcacgttgcggataaccatgctcgaaataagcgctagtcgcgagcgggtagtcggcgaagccaataccaggcagcgatggtggcgcgtattgatagaattcgtcttgcaagatgccataatcatccgtgtgtggataaacggtgaaatggtcattgagatagacggcatgtggtaaggccaattggcgaactcgtgcctcgtccggcactagggctaattggcgctttggcaggagtttcgcttgggcagctgttgttgcgatcaccaaggcagctggctgtgcatcaaaaatccgagcgggttgcacggtatgactcaaaacagcaagatggcgcggtgccgctaacaactgatagttgccaacttgcggattttgaatcacatagccgggatgtgctgcatgggccattgcgctcgttgctttcgtgacgcccgcgatatctttaaccggttcgatgataggcgttacagtgttgggcaattggtggtcggcaaccagctgcgtcactgcggccaagtcgtataatttgccacgaataatcggaaaatagttcattttgagatgtccattttgacggtagcgagttcagcattcaacgcgtcaatctcttcttgtaaggcattgatcgtggtattgtcgagctccgaaacaaattgatcataaagattcttgtcagtgtgataaatatcgtaatcggctgagcgttttttcagttcggtaaatagatcggctgctgagaattggccaaggcccttggcaacttgtttggccttgactacttcgcgattgaggctggcgatgaaatggtcggtcaaagtcgcttcagggacttgcagttcttgacggcgagctggtttggcgatcgtcaaagtaccgggtgttaccacaggaacagcgctggcggcgattgcggctttagagaagggatggtaggtaaaaacaccaatcccatgtggaatttcactagccaccgccgtgtacagtcgttgtggcaagacaaagtagttgtaatgaccgataaagctgagtttggcgctactatggaagtcggatttggtgactttgagctcaaaacaacgccaaatagtcgcgtcttgctgtttttggcgaaccagcgtatcgacaattccgcgatcgtctggcatcgtcacttcttcaaccacggtggccccttgttcttgccagtaggcataaagcgttttttctaaatcaagcgtgagctgtgttttcatgatgggcctcccagaaatgcgtcaagagttgagctaattgcgttgggttgtagctgacttgggcgtgggtccagtgatctggaaaaaggcgggcataacgtggggtaataaaccgttcgtcaatcagcagaatgactccgacgtccttggtaccgcggatgacgcggccacctgcttgtaacacgttattgaaacccggcagctgataggcatatgcgaatccttgaccgttcgcccgatcaaaataggcccgcagttgatcggtttcagcattgatacccggcaaccccacggagataatggcaacgccaatcagtcgatttcccttgagatcaatgccttcagcaaagatcccgccaagcacggcaaacccgataatcggttcactgccagtttgaaaatgatctagaaatgtttgccgatccgcttcagtcatggcattttcttgagcgcaaacctttagatcgggattcgccgcagtgaaggcttcataggccgttttcaagtaggcataggatggaaaaaagaagagatagttgccgcttttggtgcgaactaatgttgtcaggctcgcaatcaactgcggcaaatcctgcgtgcgtcgtcgataagtcgtattgacgctagcgtcaacaataactgcttgtttggcgggatcaaatggggagggcagcgtataggcgagactattgtcgatcccgccaagcaacttttgaaaatatgccatcggtgataaggtcgccgaaaataagacggcaccacgcccttttttcaaggcttcgtccacaaattgcgatggatcgagacacagttctttaaccataatctggccgttttctttagtgacttcggttttgaatgtcgcgtcatagaagtcgccaattcgcagatattgattggctagaaaaaataccggcaaaacgagatcgacagcaggttgcaacgcgggggttggcggttcgctgagccaatcgtgaacgacttcagtgaagcgaaaaagaactgcggtgaggtcatcaagcggatcatcttgaaagatggtcggttgtgaggtcaacaaggttgaagtcgttgcatcaagggtattcaaaatacgtgtcatggcgcggcgaacttttgtcaacggggcacctttataaggggttagcgctttttttaactggacgaaatcttgatctgtgatggcagcggtgtacatgtcccgcgcgcgactgactaagttgtgcgcttcatcgatcaggaagaaattgctgtcatctttttcgctaaaaaagcgttgcaaaaaaaccagcggatcaaagagataattgtaatcacagatgatgacgtcgcaaaataggctggcatccagtgaaaattcaaatggatcgagcctatgtttgcgagcataagtctcgatgacgggacgcgtcagttgatcctcgtgttccagtagatcgtgtaaggctggttttaggcgatcatagtaacctaacatgtaaggattcttgctggggtcatcaggttcgtcagcaaatgtgatggtgtctttagccgttaaagtgatacttttggcagttaaacctgcttgcgccatcaaggccatcgcctgttcagccacgcgtcgagtgctttgcttggcagttaggtaaaaggctcgttggatcaagcccgtgcccatcgcttttaaggttgggaaaagtgcagagatggttttaccagtgccggtgggagcttgcacaaacaaacgtgcttggctatagatcgccttataaacagcggcggctagctcatgttgaccagctcggaattgcggaaatggaaaatcaagctggtcgatggaggtgttgcgtcgtttgatgatatcactacgtagtttgagccagtcgcgaaattcttcaagtaaatcagtgaaatcatcagccaactcggcggcacttttgacttcactgaaacggctgactgtgtcggtgctggtctggacataaaccagcgtgattgttgcttgatccaaatgccgttgttcacaaagtagatggccataaatacgtgcttgcgcccaatagcggtcttttgtattttgtgtggcctcttcccatgggcgcgcactggttttgatttcctcaactgtgagtccggtgtcatctgtccagacaccatccgctcggccttcgagctgatagtcttcatcgttcacggtgacggcggttttgaggtaaacttccttttcgtaatcggactcacggtgagcagcttgaagtttacgatgaatttggctaccaatgatggcggtgttatttgaattgctggtgattggattgaggtcgccggtgcgaacggttaactcaacgaactcacgaataccaatgcgattgtttgccatcactgcgcccccttgcttgtcatggttagttattagtatagaacatacattctctatggggaagactggtgagtcagggtcatgcgccgtcatgctctagttccgcgtcgcaagcctcatccggccggagattgcggagtttggcacggcaattttagcgtaacttttgaaaactaaaaataccgggtgtttctttgcttttataaatataagaggcataataagggtgtcaagacatgacaaatacggcggcttgcaaacactgtcgatcggtaagccgcgacactgaatgagggacatagaaatgaaaaagactagtttttggcggctattaggcttaatgggtgctgttttgttattactgacagcctgtggcaagcaggggacggctacgaaatcgtcttcaagtgcgccagtgaaaatcacctactggcatcgaatgacggggacttatgataaatcgttgaacaagctcatcaccaagttcaaccagagccaaaagaagtataaagttgtcgcaacttcgcagggatcatacaacgcgttgcaacagaaaattatggcagccggcaaatcaaaaacgttgccgaccatggcgcagtcaccgtatacgaacattggcgactacgtgaagaacaagttgttattgccatttgatccagaaatgttaaatggcgcggataagttgagcaatgctgatttaaaagatatttatccaagctttttgtctgcaggtaaatatgagggcaagtactacggattgccattctcagtctcgacttcggtgttgttttataacaagaagttgatgtcccagtacaatatcagcataccgaagacatgggctgattttgcagccgatcaggagaaactcaagggaactgatgtcaacgcgattgagttagatcaaagttatgatgttgcgcttgaggggatggcatatggtgctggcagtcaactaattacaccgaaactgaaggctaatttgaatgcaccgaagacattggcagctgtgaatcaaattctggatctgcgcaagagcggtgcgctgaaaactgctggcgaagatcaatacttcagtgtgccatttgcaaatggaaaagcgatctttgggattggttcttcggcaaccgtgccggttcttatccaacaggccccaaaggatcttgactggggtactgctgtgattccgacatacgaaggcaaacgcagcaatccactgaacggaaattacaatgttttgtttaaaggggcctctaaagcgcaacaagcaggcgcttgggcgttccagaaattcttactgaagtctgaaaatgcgtcacagtgggcgatggattctgcctatgtgccggtgacaaaaacggcatctaacagcacgacatttaagaattatttacaaaagaacgacaagtataaagccgcggtctctgcagtttcacagagttttgcctcaactgtctttaccggttacaccgattatcgtaacgatttgatgagcactgtcgacagcacgctgaccaagaatgtcagcggcgaaacagcgtttaacaatttgcaaaagcagactgaaactattttaaaagaaaataaataactttatttaaagaagaccatcaaggcgagtgttgcttgccttgatggtcttttttagtttgcgtctgcttgctgtggtgggctatgatggtctgagcagttctaagcttttaaggagactgatatggaaatcaatgtacacaagtttcaggaagccattttagatggcagcttcgagcataccgagaatcatctgaccgctgcagcgttcaaaaaggacggcatcgaggcgggcttgacgaaggtgtttgcagacgtccgcaaggccatcgacaagcagcaactgattcaggccgacctcgtcatcgattttcctgagccgaccatcatcacagttgaaactggcatcattaatctgccgtttgcgaatgtcaataaagtcacgaactttcttgaggcagacgagattgtgccggttcgggtctatttagtggtggcatcaccatttgtgaacgtgtcgggtttgagaatcgatgaaattgcaacggcagcggattatctcacaggctttgagacgctcaataagcaaatgaccgcttccgttcatgagaaacttgaccatattcaagaagaaatggcgaagcccaaagaaaccgcaaaactggtgccagctaataagcaaaaaacaccagccaaaaagaccacgcgccggacggcaacgaagcgaacaacgacgcgcaaaacaaccaagaaaacaacgacagcggcagctaagaagccagcggccaagataacgaagcggacgaccaaaaaagcggcgcccaaaaccactcggcgaacaactaagaaataagctgctagtcgcatgctgaaaagagtcattccatttgggatggctctttttacataccaacaagaccatctagatcccttaaagcgagggggtaaccatttaaaagcaaacatacgatgaataatattaacgaaatatgagaataacgtgtgagatatgaaaatcattttgaattgaaagcgattccagcatattcttaacttgttggtggaataggccaatcttgttgcagaaaccatccacaaaaggaggttgaagttttgaagaagcacgggtttcgattttggttattggcgattgttggactgctgggtatggtgttgagtctgagtcagccgcccaagcaggtagctgctgctgataacaccttgaaaagcgttttttcgattgatgcgggacgaaagtttttttccgcggatcagttgaaaatgatcattgatcgggcacatacagacggttacaccgatgtgcaggttttattgggcaacgatgcattgcgattgctacttgatgacatgagcgtgacgatcaatggcaaaacatatggcagtgatgtcgtgaaacaggccatacaggctggtaacaaagcgtactacgatgatccaaacgggaatgcgttgacgcaaaccgacatggatgcggtcttgaaatatgcagcggcacgggatatcaatatcattccggttatcaatagtcccggccatatggatgccattttgacggcgatggcgcaactaggcattaagaatcctgcctttaatgggtctaaacggactgtcgatcttaacaatgacactgctattgcctttacaaaagcgctattgcagaagtatgtgatgtatttcaaggggcatgctacgatcttcaactttggcagtgacgagtatgcaaatgatgtcgatactggcggctgggccaagttgcaacaaagtggcacctacaaaaagtttgtggcatacgtcaacgacttagcggcgatggccaaaaatgccagcctgaagccgatggttttcaatgacgggatttattatgacaataacaccagtttcgggacttttgacaaggatttgatcgtctcttattggaccgctggctggggcgggtatgatgtcgcaaagccagaatttttgaccgataagggtttgaaaatcatgaataccaatgacggttggtattgggttttaggtcgcgtggacggcgatctctatagttacaaaacggcgctagctagtttagcaagtaaaaaatttactgatgtacccggcgcttcgagtgccgtgccgattattggcagtgtgcaggcggtttgggcggatgatccgagtgcacagttagacatgccggcgctgttgaagttgatggatcaattttcgacagcctatgcaccttacttagttcgcccagccgattacagtaaagttgatgccgccatcgctgccgtgccgcggcaacttaatcagtacaccgaagcatcagttgctaaacttgatgcagcgttaaatgctgttgtccgcggtaaaaaggcaaccgatcaggcattggttgacggctatgcccagaccattactgtcgccatcaaggcactgcaactgcggccggccgattacacaaaggttgatgccgccattgcagctgcaaagaaacttgaccggtcacactatcaagaccttagtgccgttgatgcggcgcttgctgctgttaatcgtaatctcagcatcacccagcaagcccaagctgataccatggctgccaagattacagctgccatcgctgcgttggttctgaagccggcgccgcaacccgatccaaggcagcagcaagtgccaacaaaaaccattgtgaatccagaccggtatttaccaaaaacggcagaagcttccgggtgggaattgatgctagctgggcttgccacgatttttggtgtcattagcattgttttcttttggcggcaacatcgcatggccgtctaattcctgacaataatcaaaaatacggcccgctacgcatcttttgcgcaacgggccgttatggtgttgtgcgccaacaccatttcatagtgtcacgcaaggatttgatgaaattgtgatgtcattgagatgattttggctgttttgacaactacctcgccagcatttacccgcaaaataatcggctagtaaggttccgtcttgttatttagtttaattgagccgcaagtttacaaaataaaggtcagcggtctagataggtactgtataatgaacttgaaaacgacgaaaaagcagcgcaaaggcaaattggttagaaaacggcgtattagcggacatgaatgagatgatggggtgttcatcatggggttcagaggtttaacatgcggatttctgatctgaagcgcttgtttaaaaaaggagtgggcattttgacagaaccattatttttaaaaccatacttcaatcctaagatatggggcggccgcaaactcgaaactgagtacggctttgacattccagacggtaaaatcggtgaggcttggatcatctcaggtcatccgcatggtccggcgaccattgaaaacggtccattgaagggtaaaacccttcgcgaggcgtggcatgaagatcccgcttattttggtccacaacatagtcaggagttcccattgctcgtgaagattctcgatgctgaagctagtttaagtgttcaggttcaccctgacgatgcttatgctgcggcccacgaagcaaaaggcgaactcggtaagactgaatgctggtacatcctgaaggcagatccaggggcttatttgatctatgggcatcacgccaaaacgcatgaacagctcaaagaaatgatcgaagccggcgattgggagcacttgttgcggaaatatccagtcaagactggcgactttgtgtatgttccaagcggcacgatacatgctttaaacaaaggcatcgtggcattggaaacccaacaaagttccgatacgacttatcggctttacgactatgatcggaaagatgatcaaggtcacaagcgtgagttgcatattaagcaaagccttgatgtgacgaccgttcctttccatgacccgaagctcgatatcaccaaagaacaagtgacaggcgggcaaatcaccacgtttgttaaaccgccgctgtcaccgcattttgccgtttatcgccttgatgttgatggcaccatgacgttcacccaacaagcaccttataccaatgtaacagtgcttaacggtgacgggaccttttctgcagacgggaaggattacccgatcaaaacaggcgatagtttcttgattcccaaccagatcaagacttgggcattcactggcaaattggcaatcgtcacttctactccaggggtagacgcataaggttgcggatcatcaggtgcccaacatattcataaagacaaaagttatccctcgacaggtttttagaccatcgagggatttttttgttactggtgtgattaaatggctgttaaacaaaaaattagaacgtaatgagaacgctttcctatcgaaataattattttcctgatttggtctaattatggaaatgtctgttaccgctgaattcatgatttcaatttctttttttaacgaaaattggtacatgttgtcattttgagaacctgtaagtcgttaaaaataaaaataagtcgcatgtattgacttcacgaactgggaacgcatacactacaagtggttggtaccacgtggaggtgagatgatggaaaaggttccgttgacgaaacagctggtagatcaactggaaacgttcattaaggagaaacttcagcccaacgataagctgccgtccgagcgggatctcagcgagttgtatcaggtcagtcgcaacacagttcgtgctgccttgaacgaattgttcttgcgcggtttcatttatcgaagcactggtaaaggtacatttgttgcagaacgatttgatgagcgaaccgatgtcagtgggtcctacagtttcactaaacagatgttggcaatgaaccgtaaaccagtgactagaatccagcgtttagaaaaaattgcggcacccgccaaaattgccaagcgcatgcgcatcgaaccaggcacgcccgtttacgtccttgatcgattacgaatcgctgacacgttaccgatgatgattgagcgcagttacttacctgctaacactgtgccaggtcttaatcaggaagcactatcaaaaacgccattatacgattggctggaaggtcattatggcattcacattgtttcagtcgatgaagcgttttttgctggattagtcacgccggaagatgctgaacaacttcgagttgcaccagcgtcagcctgtttgaacattcggcgaacaacttttgccgataccggcgagattgttgaatacaccttgagtgtggctcgcgcggatcaatttgtttatcacgtacatcacgttaatcactagataataaagcataaaccagtccggcttaggggctggcaagcaggtttccaataggaggatgaagaacattgttcgaaaaaacaactgaagaactaaccaagttaggtgcacaaattacaactgctgaaatcaaacagcagccagaactatggcaagaagcatttgataactataccaacgccaaggaaaagatcacggcctttttggatcaggtgacggccgcagctaatggcaaaaccgttcgcgttattttcactggtgccggtagttcacaatatgttggtgacacggtgacgccatacctacgcgcgcatggtgatcgcagcaagttcgaatttgaatcaattgggtcaactgatattgtgtccgcaccttacgattttctggaagcagacacgccgaccattctggtttcctttgctcgtagcggcaactcaccggaaagtttgaaaactgttgaactggctgaacaagttgttcacaacctccatcaaatcagcattacctgcgcaccggaaggccaattggccaagaagtctgaaacggaagacaagactttgttgctgttacagccagctggttcaaatgataaaggctttgccatgacaggcagtttctcttgcatgaccttgagtgccttgctggtatttgataccgccagtgacacggataagagcaagtgggtgaaagccattgcggcaatgggacaagaagttgtggcgcgtgaagccgaagttcaaaaagtgcttgaccttgattttgatcgtatcgtctatcttggctctggcagtcttggcggcttgacccgcgaaactcgcctgaaggtgcttgaactaacggctggcaagtatgccaccatgtttgacacttccatgggcttccgtcatggtccaaagagtttcctagatgacaagactttgttgttcgacctcgttagcaacaatgcctacacccgtcaatatgatatcgatgtccttgaggaagttaagggtgacggtattgctaaatccgtgatggcagtgggcaccaagcaagatcagaacttctcaggcgatgccttctattttgaaaatggccttaaagatcttccagaagcttatcaggctctcccagatgtcatgttcgcccagactgtagcattgcttgcttcgatcaaagttggcaacttgcctgacacaccatcaccaaccggcaccgttaaccgagttgttaaaggcgtgaccttgcacgattacgctggtaaggaatagagcgtgaactggcaccaagcagcatcaacgagcaagtttagaggaggcaaaagagttcatgagttactacattcacgctgcaaagttttttctcaagaatgtgactgaaattggtggttatctagaagtcaccgatgatggcaagtttggcgagtatctgccggaaacagctaagccagatggcgatattgttgaacaatccggcaaattgattgctccaggtttagtcgatacccatattcacgggttgttagggcatgacgtaatggacaacgattgggatggcattgagacaatgagcaaaaacttgctcaaagctggtgtcaccagttggctgccaaccacattgaccggttcatttgatcaactcaatgaggtttgcaaaacgattgccgcacatgctggcgatgaaagcggtgcgaagattcaaggcatttattttgaaggcccatactttacgaccaagcataaaggggcacagaatccgaagtacttcaaaaatccaagtgagcaagaatacgatgcttggcagacatccgctgatggcttgttgaagaaaattgcgattgccccagaacgtgagggtgctgctgacttcactcggtatgccaccgcagacggcacggtggtggctttgggccatagtgatgccacctttgagcaggctaaagcttgtatcgaagccggtgcaactgtcttcacacacactttcaatggtatgagcccgttgagccatcgcgaacctggtatggtcggagcagcgatgtatctgcaaggggttgatgatgagcttatctgtgatggtcatcatgtccgtcctgaagtggccaccaccttgattcgactgaaaggcgctgaacatatcgcattgattaccgattgcatgcgtgcggggatgatgcctgatggcgattacgtccttggcgaattcccagtttatgtcaaagacgggatggcgcggatgaaagatggcgacagtctggcgggttcagttcttgaattgaaagatgcgctgaccaatctccttgcttggaacgccgcaacaccagaagcaattattcgaatggcttctcaaacaccggctgcttcttgcaatatcgacgatcaatgcggcagtattttacctggccgagccgctgattatctagttttggacgctgatctcaagctcgaagccacctatcttgatggcaaattaggctatcaagctgaagcatgaaagctttcctgacacaaaaccttgtgaaataaggtgtcagtgtgtgacacttaaatatggcagcataagctgttatgaatgaaaggaggccagcgctgcatgacgaccttttcgatcgatcatgagtttatgttggacggtcagccgttcaagattctgtctggcgcgattcattacttccgagtccatcccagtgattggtatcacagcctttataacttgaaggcactgggatttaacacggtagaaacctatgtcccttggaatctgcacgagtacaacgaaggtgactttgatttcagcgggattctcgacattgaacgctttctaaacaccgcaaaggatcttggcttatatgccatcgtgcgaccatccccttacatctgcgcagaatgggagttcggcgggtttccagcatggctgttaacgaaaaagatgcgcttgcgaaccgacgatcctgcctatctgcaagcgattgaccgttactacacagctttaatgcctcatcttgtgggtcatcaagtcacgcatggtggcaatgtcatcatgatgcaagtggaaaatgagtacggttcatatggcgaagacaaggactatcttgccgccgtggccgaacttatgaaaaagcatggcgttgatgtcccgctttttacctcggatggtccctggccagcaaccttgaacgctggcagcatggccgacgctggtattttgactaccggcaattttggctcacgtgccgacatgaatttcgatcggttggcggccttcaatcaagctcatggacatgattggccgttgatgtgtatggaattctgggacggctggttcaaccgctggggcgaaccgatcattcgccgcgacccagaagaaactgccgaggacttgcgagcggtgatccaacgcggcagtgtcaatctctacatgttccacgggggaactaattttggctttatgaacggtacctcagctcgcaaagatcatgatctaccgcaagtgacttcctacgattacgatgcaccattgaatgagcaaggcaatccaacgccaaagtactttaccattcagaaaatgatccacgaagtcttgccatcgcaggcccagaccacaccgctggtcaagccagcgatgaggcaagcggacaatccgttgacggcgaaagtgtcattattctcagtacttgatcagctagctcagccagtagccgcaccttatccgcagacacaggagtttcttggccaatacaccggttatacgttgtatcgaacaaacccgctgatcagtggtaccgacaaaggcacgccggctaagttgcgcgtgattgatgcccgtgatcgggttcaagccttctttgatggcaagtcgctagcaacacagtatcaagaggccatcggcgatgacatcctgctcccagaagttgaaggccgccatcaactagatctgttggtcgaaaacatgagccgcgtcaactatggctcaaaaatcgaagcgattacccagtttaagggaattcgcaccggtgtcatggtagacctccatttcattaaggactacctgcaatacccacttgacttgaacaaggcgccgcaacttgatttcaccggcgattggcaagcagggacacccgctttttatcaatatgggtttgatgtggtgaaaccacaagatacgtatcttgattgtcgtggatttggtaaaggagtgatgctggtcaatggtgttaacatcggcagattctgggggaaggggccaacgttgtcactatatgtgccagccgggttgcttcacaccgggcacaatgaggtcattgtttttgaaaccgaaggccaatatgccgaggcgataaacttggttgaccacccaatatttaaggaactgaacacagaggaggaataaaaatggctattattgcagcacgtattgatggtcgcttggtccatggccaagttgccaatctctggactactaagctcggcgcaacgcggattatggtcgtggacgaggccgcatcaaagagtgatatcgacaagagcggattacggatggcaaccccagatggtattcgcctgtctgttctcgatgttgccacagcagcaaaccacattttgaatcacaaatatgattcacaaaaggttttcattgtggcaaagcggccggagacattcctcgcattggtgaatgcaggtgttccgatcaccgacttgaacgttggtaatatgtctcaaactgatgaaacccgttcaatcacgaagtccatcaacgtggtggacgctgacgttgacacatttaaagaacttgatgcaaaaggggttcatctcacagcgcaaatggttccaggcgacacagcagcggacttcatgtccctgctcaaaaaaggatagggggagtcaaacatgattgcatggtggcaaatagcacttttaacattatatgcaggctatcaaattcttgatgaactgcaaatttattcagccatgagttcaccagttttcgccggcttaatttccggcttggttatgggcgatatgaaagccggtctgttgatcggtgcatccacacagttgatggttcttggggtcggcacattcggtggtgcatctaaaattgatgccaactctggtaccattctcgcaacggcattctccgttagcgccggcatgaagccagaagcagcggttgctgcgattgcggttcctgttgcaagtatcatgattcaaactgatattcttgctcgattctcgaacactttctttgctcatcggattgacaagatggttgatcaaaataactacaaaggtatcgaacgttacttcctcgctggcgcgcttccgtgggcactgtcacggatgattccagttggcttggctttagcatttggcggcggcttcgttaccgaccttgcccatgttttgaataccagctggaaatggttaggcgatggcttggcaacagctggtgccgtcttgcctgctgtcgggtttgccattctgttgcattacctgccacttaagaaacacttcccatacctcattatgggctttgttttcaccgtgctgttcacgacactgtttggcagcgttcagaccttgggtaccgcagttgctggggtagctaaagggttcactgcttccttcaacggtttgtccatgcttgctatggcattgattgcgtttgcctttgctgcaatcagctatcaacaaacaacaaagctgcacgatatcgcagttggcaatggtaatacagatgcagcatcaggcacagccgcaaacaagactaatgaacagggggaaatcaccgatgatgaactctaataaacctacgtacaaattgaccgataaagatttccggcagattaaccggcgcagcctgttcggcttccagttgggttggaactacgaacggatgcaaggttcgggttatctttacaccattttgccgcaattgcgcaaaatctacggtgatggcacaccagagctcaagaaagtcatgaaaacccacacccagttcttcaacacgtcaaacttcttcaataccatcatcactgggattgatttggcggtcgaagaaaaagaagggattgctggcgaagaaactgttgccgggattaaaaccggtttgatggggtccttcgctgctatcggtgattccatctttgctgccttgattccagctattttcggggcgattgctgcacaaatggcaacgcaaggcaacccagttggggtcttcatctggatcgctgctcaaattgccgtcatggtatttcgttggaagcaattgcgaattgcttataacgaaggggtttcgttggtcacaacaatggcgcatcgattggctgctttgactgacgctgctaccttgatgggtgtcttcatggttggtgccttggtcgcaaccatgatcaatgttaagattggttttgcgccgaagatcggcagtgtaccattggatttccagaaatactttgacttgatcattccaaaactgcttccagccttgattgttggcgcggtttactggttgcttggtcgtaagcatatgacctcaacccgggcgattttcatcgtattgatcgtttcggtgctgctgtcggcactcggtgtcattgctaagggttaatttggtatcagaaacgttttaaaggagtctttcgatatgagtaaattagttttgattagtcacgggcaactgtgtgaggagcttaagaagagcgctgaaatgatcatgggtccccaagacgatattgccaccgttgcactgttgccaaatgaaggtccggaagattttcaggccaagtttaaagctgctgtagaggggcaagacgatgttgtcgtccttgccgaccttaaaggcggaacgccgaataacgtcgcagcccgtgtcttggctgaaggcggcaagttcgacctgtattctggcatgaacctgccgatggtcatcagtttcctgaatgcccagatgttggacatgaagccagatctgatcggcgatggtaaggctggcattgcttatatcaatgacattgtgaagcattaatcagccaaaaggttcatggaaagctcgtgtcgagttgtgacacgggctttttctgtacgacgaattgtcaactcaagtgcaactttttacccatgaagacttctgatggcgtcttccagcctaagaccttgcgtggtcgattattcagttgttcaatgtaagtctcaatttcctggtcgctctgaaggtctaggtctgtgttcttgggaaagtattctctaatcagtccgttggtgttttcgttagttcctcgttgttgaggcgcgtgtgggtcaggaaagaagacctttgtattcagacgctctgccagctccctgtaccgggcaaactcccttccacggtcaggagtcactgttcttactcggttagctggtaaggcaccaagcagctcaatcatgacgtctctaacagtgtcagcttttgcgttggccgttcgcttcgaaagcagatagcgtgatttacggtcaactaatgttactaatgcagagtgtcctgttttaccgcgcactgtatcgccttcccagtgaccaaaccagctgcgattttctgccgaccggggtcggtcgtgaattgatggcacgtcattgaagcgcccccggcgttcatttatggtgcctttgattttgcgcgtcttgcctcggtgtcgaagcagccttggtagcccgcgagcaccatggctcttcaatggaacgccgagattatctaggtagatacctctgtagatagtcgaatagctgatgcgaataggactgccttctagtgacaagcgaccggcaatctgctcaggcgaccaatgtagcaccgtgatatatcgaatgacagcgtcacgagtccccggtcgatcgaggatccgaggacgcctgctagccaagcgaacccgccggtagcggtactgagcggtggctgccgaatagttccgccagccgccgttacgtgcaatttcacggctgactgtactcttggaacgacctatctctttggcgatggtatcaagagttttgcctgtagagataccaagcagtatcgattcacggtcttttaaggtaagatgggtgtacggactcatagtcgagttctccttgtagttggtcttgtggtgattccattttacaaggactcaggctatgagtcttttctatttgactaatttgttgcacttgaattgtaaatccgtcacgctaaaaatgaattgccttagttaacagaatggccctgacgtcaagaaaacagttagatttttcaataattgcttacttaacacaaaaattttgaaatcttgtctgtgataacaaagcttgattgattccaagcttaaattcttttgaattgatatcaataacagtacaataaagaaaatcaatcctaagttgaaggtgggacctatatgaacgacaagtctgcaataattgaacttataaaaaatcaaattactgctaaaacaacacaactaacgactgataatattcaaaaaataactaatgatattcaaagcttacttaaaattctcaatgacttagcaacgattgaatttgttgctacatcctcagtaacaccggaagatgagtcggcagcgttcacaactggtcaagataggacacaggctgaagaaagaccaatagcggttgctgaggtcaaagacgatgttgagccagttacaagtgagcaggtgccagccgcctccaccgaggcaatctctgaaaaagaagtgttattcttttctgaacattggttggatcagcgtcacgcttacattggccggtttcaccttgatttaaatggtgggcatgtcggtccgattaaggtatcagagagtaagctacataaaatggcaaatgcgccgacaaatggagattgggttaaggccgaggagattaaggacgacgagctgctgcgctacaaaattaccacgctgaaacgcgatcccttgccgaccgaaattgttcggctgcaatttttaccggctgtctatagacaagatgtcaaacgctggtatattgagtttcaatcgcctgagcacgaaactacccagcaattgttgctcggtgactacgatgtgctctcattcaagctgaagccaggcgattatattgactatgcttaccggcgggggcaagaaattgatggcaaaatcgtttggaagtacacggcatctgctgtagtcgctacccgaatgaaacgccaatttgccaaatctgcactagaagcgtcggcagaaacaaagcctagtcagccagcgccagccaagaagaaggtcagcgtggcacctgtgcggcaactacgccaggttttcgccgataagtcactgttactcgtttgcattgaaaactccgccatgccgcgcaaggtgaaacggcatgttgaagaccgtggcggcaagctcattctctcgccgcgatcagattcgaacgccatgttgaagaaaaaggttcaaaaggccgacatggtcattgtgaccaccgattttgttgatcatggacagatgtatgctgctaaagacgaggctaagcgaattggcaaaccaatttggatggcaaagaataccaatgagcgaaacatgttgcaatggtataaacgtcattttggcaggcaaacggcggatcaagagattgagcaggcggctgaataaggggtgctgtataacgggacaagaaaatgcccattttcaggttgtgacgtgtgatcgtcgcctgaaaacgggcatttttttagaagagtgtggctgttggtgatttggccttgcgggactattttggaacaggtgcttcttgctgatgccaagtggcgtaaatcgcgagtattcgatctaatgcctctttgagtaatggccgtggcatgccaatattcagccggacgaaaccttcaccatcggccacaaaatagctgccgacaacacaggaaaggtcgcaagcggtgaagaaacgcttcaactcggcttcatcagcaaacagtcgtcggacatcgatccaagccagaaaaccagattcagctggcatcacctgcatctccgggatctcagcaagccgatcgcgtagataaacaaaattatcagctacataggcgaccatttcatctagccaagcgtcacacttggtataggctgcgatcagggcaggtatggcgaaactgttcggtgaagtgattgaattggcggcgaattgttgcgctaaccgatcgcgaatcccagcgtcaggaatgacaacgtaagatgtttttaatccgcctaagttgaaggccttattaggcgacaagcacaaaatactgtgatcgcgaatcgctggacaagcctgccagatgctagtgaagtggacgccgggataaacaatatcgcggtgaatttcatcacttaccagcaagacatggtgctgaaggcaaagatcaccgacctgttcgagttcctcagccgtccaaacacgaccagatggattttgcggactgcagaggatgaatactttcacatctggccgtgccattttgtcggccagatcttcaaagtcaaacacatagcggtcattttctagttttaacgggctggtgatgagctgtcgctggttgtgctcaacggcttcggcgaacggatcataggccggtgtgttaatcagtacactttcgccaactgccgtaaaggcttgaacaatataatgcaaggttggcaccgtgccgtaactcaatttcaaccaatctgcttcaagttcaagcccaaaacggcgcgcgttccaagcaataacggtttcgttaaacgcatctgggatataggtgtaactatagtcagaaactgcggcgcgggccataacggcatcgtgaatcggtggtgcaacaggaaagtccagatcagccagatccattggaatcgcgttaggcgttaggccgaacttctttgccaacacactatcggcccatttgcgcgcgttaccggctttacggtcaaaaagggtgtcaaactgactcatattcttggtcctccagtaacatcaagtctttgcttgtctgattcagcacctgtgcaccagtatccgtgattagaacatcgtcttcgatacggacaccgccgatgccgggcaagtaggcgccgggttcaatggtgactaccatccccggttgcaaaaccgtttgactctgagggttcagaatcggttgatcgccgcctagtccgagaccatggcccaatccgtgggtgaaacaatcgccataaccggcagcggttaacacgccacgcgcaatcgcgtcaatctctcgcgcttgcacaccgggttttaaggcatcaatagcagtgagttgagcagtaaggacggcatcatgaacggctgagagcccgggctgcggttcgccgattgtgagcgtgcgtgtcatgtctgattgataatcgttaaggacaacgccaaaatcaatcgtgatcaattcaccgcttttcagttgccggtcagtcgcccgaccatgtggcaaagcgccacgtgggccgctagcgacaattggatcgaaggccatggcagatgcgcccgcctgtaaagcatagaagtgcagccatgcattcagttcatattcgctgaccccggcccgaatatgcggtagcaaatgggcaaagacctgatctgtgaccatacaggcagccgtgatcgcttgaatttccacggcatctttgaccgctcgactttcagccagcaggctatcagctaaactcaacgtccaattctgtgcggtcagagtctgaaactcaggaatggagaacccggtactgacaagtgcgacccgccgacataattgagcgcttaaaaagctaacgagttccggtaagtattcgccttgcggtacttcaatattggtaaacccactggtgtcagccgcttcattgcgatatcggccatcgtgaaattgtagcgcttgggtgggggtaaccaccacatacacgccactgccaggcaaggcaccaacgtagcgtttgctttgacgatcgtgcagcagtaaggcgtcaattgcctgcatcgtgagtgcttgttggatttttttcaaatgtgtcattttggcctcctaagggtgcgttaacttataagcgcgctagatcacgctctcaaacgcgttcaccagaccagaaacctgcgtgtaaggaccctgaacgcaatggcccaagcccggccatcacgttcagggccgcttacacttcggtttctaaccggtctggttcacgcccttaagcgcgccagttcacgctctagaagtctaaatccagtccagcgagggtgtcttcgtcttcttttgagaaaatggactttttcgcggcttttttggcttcgagttttagttctgcgcgttccatgaccttgaagaatggccagtaaagggcgacagccagcacgagttggagggcgttggcgaagatggtgcggtagtcgccgttggttaggaacccttcaaggaaaacgccgacatatggtggattgaaaatcggtttggcgatccagccccagtgcatgaagaacatcggcagcgtgccaatgatggcaccaccgaatacatgggggatgaacatgatcggattgagaatgatcggtgcgccaaacaggataggttcgttgatgccaaataatgccgggaacaacgaaattttgccgattttccgatagcgtttgctcttcgagagcatgcaggcaacgacgcagccgatggaaatgccgcaaccggtgaaaccgaagaaactagaaacagcaccagctgtgtaaaaatgcggaatggcttcgccggcgttcatcgcagcgatgttttcagcgataaacgtgaccataatcgggctggtgatcggggagaagaccgatgagtggatgccaaagaaaaacacggtgcaaatcgcaaagttgagcagtaagaccgcccatggattgtccatgctgccgaccagcggtgccagaaagcgggtgagaatacttggcggcagttcgccagcaaagttcaggaaggcgaatcggccagcgataaacgcgccaccagtgatcaaggtgactggaatcagttcgaatgaacgggagacaaaatctggcaccccgtcaggcattttcaatgttaggtgatgggttttgcaccagtgatagagctcgactgtcagcaaggccacgatcatgccggtgaaaagtcctcgagcacctagattggtgacgtctaactgaccggttttagtgaacgttgcgaccatcatcaggaaggcaaaaccggacaaggtgacacagcctggagtatagagtttgtagtgattgcctaagttatacgcgatggataaacaggcatacagaccaatcatgccgatggataacttcaccggcagatcgaacaagtcagcattgctagtgatgaaaagcgagacagcatttttaggaccgagcatgttaggcaacgccggaataatcgtgaaaatactaccgaggatggtgaacggtgtcatggcgaccatccccgccttgatcgcgcttagatgacgctgattgtcgaccttgtgtgcgatcggcatgaagaagcggttcatgaaagactcgaattgactgaacatcgtgtaatcccctctcaaagtcgtaccgatgaaacgttagccagcgtgctttttttgatacttcgcatgggtcagcagtgctagtttcataaccgtggcaccatccatttggccatacacatccttatcaatgacagcaaatggaatgtgccgtggatcacagatttccccaatgtagccagttttatgaccaatctgtggtcctaccaacacgatgtcatagttatcgatttcttcttcaagaccgtccacgggaatcgcgtcgaatttaaaatcatcttcgtttaatttgtggctatctttgaccaccttggccatattttgcatcaacatattggtagaaaagccaccggcacagcacaaaagaattcgcatcattattttcctccttaggtttaagtacggccattgaccgatactctgtcacacattggttttcgttgtttgggcttcaaaaatggtaatcaaagtttcaatcaaatcgcgtgcgagttggctggtcatgtagtgatcctgcgcatgtaccatcagaagactcaccggttccggcgtatgattaggatcaaactcgcggcaaatcattgccgtctgggcgttatgagcggcaacatcaatcgccttagcctcagccaataagctgcgggctttggcaaaatcctgtgtttgcaccgcctgcaaggccgcaaatgccttggttttactctcaccggcattagcaatcaactgcataatttctaattcttgggtcgttgccattggggttaatctcctttagagcgcgagcaggagcgtttaggaatcggagtgtaagcggctttgaagtgaaagaaccggtttttggttcttttgcttcaaggtccttacacgtagattcctgcgactgcgagcgcgttttataaacagagcgcgagccagcctgtttagaaaccggagtataagcgggcacaaccgtaatggtcggtttttgaccattgcggttgtggtccttatacgcaggtttctgggctggagagcgcgttttatcggtaccagacgatcaaaatgaacgagctttctccgctgttgccacggtcagtcgtcgacacattgcggcatataaagcgaccatttgatccacatcctgtacctgcgctaacgattgggcacagtgaccatagcggcatggcagaattgtgacgacagtcggaatgccaacaccgactttatgggcttcaccaccgtcagtaccgccaccgttaaacatatccagctgcagcggcagggaggcggttgcggcagtttctttcacaaattgttgcaacgtgcgattaggtgccaaggtgcggtcaaagtgcgtcaggatcgggccgctgccgacttggcgttggttcacttcgctacgttcgcgcggattttggaaggtggcgacatcgacgataaatgcgagatcaggctggatcagttgagttgcggttttcgcccctcgaatcccgacctcctcactgctggttgcggcaaaacgtaaagtaaacggtaactcatcttcagctaattcctgcagcaggcgtgcgccgacatagcagcccagccggtcatcaagcgccttaccgccaaaaacgccatctgcagcatacttggtgaagtcagtcgaaaaagtgaccatgtcgccaatggtgatcccaagggctgcgacttctgctgcgctattggcaccaacgtcacatagaatctgatcaaatgcggccaaactctcatcccgaatgaccatgcccggcaattttttaccagaaaccgtggtcacgcggacgctttgccaatggcttgccagtggcttaacgccgccaaccaccatcaaccgcaacagaccttcaggcgttatcgtgcgcaccatatagccaacttcatccatatgaccgtaaatcatgaccgaaaacgctggtttaaccgttcgtttcgtgaaaatcagtgagccgaggccatcagtttgaacttttagatcgacaggctttagataatcgcgcaaaatggtgcgaacctcgccttcgttggacgcgattgcatctgcgttacttagcgcagccatcagttgtaaatccatgtttgctctgctccttccagtgccgtgcgtaaaatgttaatgaatcgggtgaaatcagtttggtggacgagttgctcgatgacatctggctgttgcattaaggctgctaattgcgttgttagtgtgcgatgcaacggtagctgatcgcgttttaatgcgattaaccagactaacttaaccggtcgagaactgccgccagcaccatttggcaagaccaccaccgcaacggcgttcttttcagcgttgaatgacaggggatgcggaatcgcaatgccgttgtcatagatggttgctaaaaagttttcccgctgcatcactgattcggcataatctgactgaccacaataagaagtcatggtggcggtcagtgcgagcaataaagcgtgataatctgccgcctgacttgtctggaaaaacaacgccggtgttagtaaatcgaccaacgtgtcagtattattgctgcgtgccgccattgatagttcgtgacgcaggttggcaaaatccagatcagatgccaattcatcaatccgaacgactggacagtcaaacgtctcggttaactcagtcaccgtgaacagtaaatctggttcaagctcatgaattgcagtgagttcattaagaccgaatgtctggatcacagcctcagggaaaatgcggcgcaatcgtaaacacaataacgtcgcaatcccgccgccagtgccacaaagaactgcgatcttatacagccgccgactccaagcctcgtgtgcctgttcgagcgggactaacagatgagtagtcaaataaccaatctcggtttttggtaccgctatttgatattcgcgagtcagccactgggcaaactggaccgcccagttgaacgcaatcgggtagtcgcgggccaatggttccagacttaaccctgccaaactttgatgtttctgcaatcgtccgatcagtgccaacacatgaaaatacatgagcgacaaaaattcgggatgggtggcgaaatcagttttgtgccgcgtatctaaagcggtgaaataagcttgcagttttgttttcaacaggtcgtggtccagccgcgtggtgagttgtttgtgtttcgcagcgaaactgacggtcaaaaattgccatgcttcttcactaagccgactatcggctaacaaaccagcaaaagccgctgtcgttggcgcaggcacggttgcctggcctttgaccgccagtgaccaaccaacctcgccagcaaactgcgccgtgattgctggatccaaccccaatggcattaaacgctgacacaaagtctgatgatgcggcggcaagccccgttgttgtaaggcatgaatgcgactttgccattcgccttgaagtcggataccgtaatgtgccttacgttccaattgcagtggtgtgccaatcagcaacttttccagctcgcgtaaatcgcgttgcaactgttttgaactgatcagctcgtgctcggctaactgcgccactgttagatactcggtcgtggtcagcaagacatgcattaaggcaggcaatcgtttcgccggcatggccggttgtgcttgatcttgcaaactagcttgataagcagcaaactgcgcactatcggtgatggtcaactgataacccacattgcgggtaaccgtaatgataaaaccggtgttgtcttcatttaattgccgcaaatcactttgcagtgttcgccgcgagacccccaacgtcgctgctaaagcagctgcggacatcggcccgttggtttgtaaagcgttgataatggtttgttcacgcaatgactcgccctccaatcagtaagcgcttccatcaacatcgtcattatgccggacaatataaccaaccaaaagtcccacttttgcagctgttgttggcaaaaatgtcaccattgcaagtttgtccagatgaaagctaagaaatcctgagcatgctggtttatctcgttatccgtcaagcagtttaacaacaaaatagattgctgacgaggtgaaagcgactataatacgatgagaatcattacccgtataataaatagaataatattaacggcgttgtttcgttaattttcatctccaaagaatgttgtcaaaatattctgcagcaaccattggcgatgtttttatgcaaacaaaaaatcgtttctcagatgatttctgaaaaacgatttagtgagtaaatgattgatcgtcattgtatcaactgtatgttagtcaaccgttccagctgcattcagttcggccatatgaaccaaggtctcagcaattttgcccatcgcttcagtcgaaactacttcataaggaccgtgaaagttgataccgccattgaacaggttaggcgttggaatgccttgataagtaatttttgaaccatcagtgccgccacggaatggaattgtcttaggtgtcatgccagccgcttgaatgccagcttcagctaagcgcagcggatagggatctttgttgatgatgtcggccatgttgtaatactggtcatgcatctcaactttaaaccgcggatggtcaaatggggcgttcaactcatcaatggttttcataaagtaggctttgcgcgcatcaaacttttggcgatcaaaatcccggataatataaaccaactgagcatcgctgatttcgccatggaatttcagtaacaggaagtaaccttcatggccgtcactgaattcaggtcgatcaaacagtggcaatgctgcatccaattgccgaccaagtgtattggcgttaatcatcaaatccttcgcctcgcccggatgaaccgaggtaccttcgatggtcaccgctgcctgcgcagcgttaaaggtttcatattcaatttggccaggatcgccattgtccaaagtgtaggcaaaatcagtcgcaaatcccttggcatcaaatttatccgcaccagtcccgatttcttcatcagggccgaagccgaatttgatcaagccatgcttcacttccggatgagccaacagataacgggcggtggctaccgcgccagcaatcccggctttatcatctacccccaacaatgtggtgccatcaccggtaattaaagtttggccaaaataccgtttcaatgctggaaactgctcaacagtcaggctcaggccgttatcaaaatgaatcggtttgccatcgtaattaggatgcacttgcggttgcacattttccgcattgtaatccgcggtatccaaatgcgcgatgatcccaaaactttttgtcggcttgtcagtgttggccggcagtgtggccgtcacaaaaccgttagccggattaagaccgacatcttggagtcccaagtccttcagttgtgcgactaaaagcttagccaattcagtctggcctggcgttgagggcgtggtgtcacgccctggataggagcgtgtattgaccttagcgtaccgaataaagtcagcttgtaactgtggcaaatcaatgtgtattgtcaatgaaatccctgcctttcgatgagaaaaatattaatattgcattgcaataagtttggatctggcttagtattttgtcaatagttgattgttaccgcgatttttggagggaatacatatgtttaagttaaaaaaatggacactgatgttgccactcgctgcattggcgttggtagctgctggctgttcgtcaaacagcagtagtagtagtacaagtcaatcgaagaaggctcagacgctaaattggtcagaaatttcttccattgtgaccaatgatccatctatgtcgacagataccgtgtcttttcaaatgatgacgaatacgcaggaagggatttatcggctaacagacaaaggacaaaagactcaattggctttggccaaaaaggtgaccactagtaaggacggcatgacttacaatgtgaccttacgtaatgcaaaatggagtaatggcgatccgatcacggcacaggatttcgtttatagttggcaacgcacagtggatcctaaaacgaaggcaacagatgccttttacttcgcgccagttaagaatgccagtgctattattaaaggcactaaacctgcgagtgatttagggattaaggcgacagatagcaaacatctgacgatcacactggagaatccaacggcttacttcaagaaaatgttagctttcccattatattatccgcaaaaccaaaaaactgttgaaaaatatggcaaatcatacgggacaacatcatctgcgcaggtttatagcggtccatttaaattaacaaaatggaacggcgccagtgatagctggacattggttaagaatccagaatattgggacaaaaagaatgttaagttgagcaaagtcaacgagactgtgatcaaggatgttcaaacaggtatgaacctttatcagaccaacaaacttgattcaattgttctcactggtgagcaggccgcggcacatcttaatgataaggatgcgattaagcgtctgtcatccaatatgacacgagttgacttgaatcaaaaacaggtaccggcttttaaaaatctcaaaattcggcaagccttttcaatggtcgttgatcgcaatgcggtcactaagaacgtcttaaaggacggttccaaaccagcattgggcttcgtgccaattgggttacagactaaccaaaaaacaggtgctgattttgcccagacaacgcaggtcaagagtgctgttgcttataacaaggcaaaggccaagaagctatttgcagaaggtatgaaagaatctggtcagagtgagcttaacctgacgctgttggcagacgatgctgacgtttctaagcaagttgctgaatacttacaaggggctttcgaaagtttgccgcatgtcaaagttacgattaagagcattcctaaggcgcaacggctacaagccatgatgtctggtaattacgatatggttgtgactggttggcaatcaatcttcgccgatgcctacaacttccttgatgtttggatcagcaattctggctacaacacttctggttataaaaataccaaacttgatcaattacttagcgaaactgagactaagtacggcaatgaaccgcagaaacgttggacaatgctgcaagatgctgaaaagatcttgatgaacgatcaaggcacgttgccactgtatcaggcgaataacctgcaactactgcggccaacggtcaagggcgtatcgtttaatccaaacggcaccccgtatgacttcaagacggcgtatatcaagtagtcacgaacaacatgcttaatcaaaatagcgcatcatgcttatctggatatagcccagacagcatgacgcgctattttttgaaaacgagctcgcgcggttagaaaccggcgcgtaaagcggccttgggagtgttagccgcgttttggttaatgcgaccaaggttctgacacgcaggtttctgggttgggaagcgcggcgatgcatgtttacttcagaagccattcatgggatggcatcacatcacgacttcaacacagagtggctcaaaatatagaaggcttcttgactagcttgataaccctttgccttggctgggaaggtggtgtcaaaacgagtcgcgtcttctttgtcatagctcatggctggactctcgtgataagtccactttctgccatccagtgcatttggcttgagaaccttcacgatcatggcagtaggctgcgtgttatctgccgcccagacattgaacttctggcaactcttaaacccgcgctcgacatagttgcccgggtcacccaaaatcacgatggtgtcgtaaccaagttcagcagctcgcttcatggacacttccatcaattgcttaccgaaaccctgccgctgaaaggctggatcaatggcgaccggaccaaacgtcagaatcgttttctcattaccattttcatcaactaacttggccttcgtgtacataatattgccaatcacttgtgcattgcgttcaagcacaagatccagttcaggaacgaaatcggcatgatttcgaatgatatgcgctaaataatgttcatcagcgccggggacataaagattgcagaaagcattgcgatgaatagtttcaacttggcgataatctgacggttgttcggggcggattgtggttttcatggggatggcctccttaaaagggcatgatgattaataatagctttgatcattacttctagaaaataatagataaaaatatgtggaacaaaaagaatgatatatgcgccattttacctagagatgaagtgcttgtaaatttcgaacaagcttttttaaaaagcagtatagctgtcacgaaggcatcacggaatcggttattctgatagactgattgcaacacagaaaaggataatgagcggtggtatcggatcagagaggtggtggtgcgtatggggaaacctatcagccacacgttgaagaaaaaggtacacaagcttgtctgtggtcgctgcattaacgacgatcacggcctgtgtggtttcgtgcgtgatactggtggctgccttaacaaggctagtcaaagccagtaccagactgctactagcagtggccgaattccgcagggcgctcgggcaactccgagaaaaataggcaaactaaaagccgcgcatccttcaggggaatctcgcggcttttagttgcttgttccaacagccatcgttcattagatggttctgtgagggcatttttgcccggccgtcgcggttgcacgcggcggctttttctctgacctcagtatagcatgacttgtgagcttttttctagtggataaatcattttaagcacggcgaacaccaatacgttgatatcaaattcagtatcaggcttctgcgccagtgagcgcattttagcagtggccgaatgccaacaggcgctcgacaaagttcgagaaaaataggcaaactaaaagccgcagtccttcagctgggatttcgcggcttttagttgcctattctagtagccatcgttcattggatggttctgtgagggcactttgcccggccgttgcgttccagcgcaacggctttttccgatttcagtatagcatgacttgtgagtctttttctagtggagaaatcattttaagcacggcgaacgcaatccgttgatatcaagttcagtatcagatttctgcgtcagttgacacttgcctgctagcggttccaaataaaacatgatatactccctttacaatcgaatagaaacatttggggtgctgtaaagctgagatgatacccatggaacctgatgcagttaggactgccgcagggaaatgtcgaagaagtgaatcgttctgtaacgatgcttgtttgtgttttcatggaccccaccaaattttggtgatgggtccttttttgaacatgaataggtgttggcgtgattggtaatgattcgcgtttttagcccccgtctgtctttatttgaggaaaacgggggttattttgatggataaatggtctttgcgcgatgtggttttgctggcgtttttagccttcctcttcggcggtgttttcatgggtgccgatgcgatttatgccgttgtagcagctgctttgacaccgctgggttatgcaccgtttgccaatgaattgttgtttggcatgtgggtgatggcggcgccgatgacgacgatgctgttgcgaaaaaaaggcagttcaattttaggcgaatgtttcgctgctttagcggagatgctttacgggtcgtactttggcccagcagtcttgctttctgggtttgttcaaggtttgggcagcgaggccggctttatggtgacacgttatcggcgttatgacgtcgtgagtcttttgtacgcagcgattgggaccacggtgttcagttttacctacgagtatttcaaacttggatacggcgcttacagtcttcgcatgattttggcgcttgtggtggttcgcttgttgtcaatgatctttttcggcgttgtgctggtccaactcgttctgaaactttatgaacaggcggctggtgccaagcacttggctagcaggtagcggcaaatgagtattgtattaaaagcgatacggtttcatcgcgagacggatttgtttacggacttgaattttgaatttccaacaggagcacttaccgttttaaccggtgatagcggcagcgggaagtcgactttgctcagtttgatcgcgggatttgcagcgatgccatacgaaggcacgattttgctggatggtcatgatgatcggaacgccgcgatgcaagtcaaagcacagcatgttggcatgatgtttcaaaaccctgaccagcagtttacgatgcgaaccttgagcggtgagttgtcttttgccttggaaaatctgaatttgccggttgctgaaattcagcggcgctttgcccaggcggttgctcttggggagactcaggcattgctgaatcgtgacttgagtaccttatcaggcggtgaaaagcagcgcgcggcgttaacggttttgctggcgatggatgcaccgattttgctactggacgagccgtttgccagcattgatccggcaagtcgccatgtgctaattggaaaattagggacgttacgtgatcatggcaaaacaattgtgatcgcagagcatgacctgacaaattatgccgatgtggcagatcaactggttgccttgaaaaatggcgagctaagtcggctaccactcgcaacgctgaccacgctaccgacgcattctaacctcacgcaaccacggcaggcgaccaataaaatcttctatctggaaaacgttgtctgccagcaaaatcaccatatcttgcttcaagcaccgagttgggattttaacgatggcatcaccaccttgactggggccaatgggagtggcaagtccaccttattgcgatcaatggtgcagctgcatccctatcaaggccgtatgttccttggtcaacaacgcttgcgtcgccggaaacgactttatcaaactatgacgctagccgtgcaagacgcggcaaaacaattcgtgacgttgacgctggctgatgagctagcgtttgggccggcgttaccggctgcggtgcgggaaaaacaacaagccgcattagcttatcttggactagcagaaaagcagaccactagtctttaccagttgagtgaaggccagaaaaagatggttcagttgatgacgatgctgagcttagatttgtcatttttactactagatgaaccatttagcggtttggatgatcgcgcctgtcagtactttgccgcatggattaaggctaagtcggccacgcaagcgtttttgatcgtgacgcaccgattggtaccgttagccggcatcagccagcaacaggttttgctagccaatcagcggttgcaggttgtgcaggggtaacgtgatggcacagaagaagacagatgcactcaacttgagcctcttgattctagccttaacgctagagatttcgtttagtcacgcggtgaagctgaatgtcgcattgatcgtgttagcactgggttttcttgggtggcggcgagcctttagaagcttgatcgtgttactgctgctgccgttgatcccagccgcgagcagctattgggccatcacgcttcatggaacagacacatcttatgcgctgttactgtttgtccgaacatacgcgtttacggctttgggcttggtgtttctcactggcgttgatttggaggcgttgttgttgtggcttgagcagcataaactatcgccgaattttgtctatggattattagtggtcatccatgccctgccgcaaatcatgcgggaagtggctgatcttcgggaagcgagtctgctgcgcggtcagaaactgcgtccttggtcaccgctgatttacgtcaaggtcatcttcgttgcgatggcttggcaggatcagtatgtgaccgccatgtatgcgcatggctacacagaaggcggttcgcgaacggttcaacggcaattgatcagttcccgccgcggtttgttgatggcaggcgcagtgttcgtgatggtgaatcttattggccattaacgtcataaaaaacttgattctagtaaaaatacggtttttaggctttgaatatggtcaagatagacagaattaaaggagcaaacgatgatgaaattttctgaaaaagctcggcagcaagttgttccgtactgggaaggcagcttcactcacccatttattacggagctacaagctggcacccttgatccggcgattttccgcttttatctgattcaggatgcttattatctgcaacattttacccatttatatacgctgattgccgcgcagacgcaggagccggaattgaaagcttatgcgctgcagtcggctgaaggtttggctcaaggtgaaattacgatacgccacgattttttcgccgaattgaacatctcaacaaccgagctggcggccaccacgattgcgccgaccacgtatcactatgtttcccacatgtaccgacaattggttgaaggcacgccgcatgtggcgattgcggggatgctgccatgtccatggttgtatcaggaggtggcacagcagttgcagcaacgaaaatcacccgtgccgatttatcagcgctggattgacacttatagcggtgcggacaatgctgacgatcagcgagcggcgattgcgttgattgatcggttgtacgaccaaagcatgccgattgagcagcaacaaatgctggctgcgtttcggatcagcagtcaaatggaatacagcttttgggagatggcgtatcacttagaagcgtggccgaaaggagcaaaggttgatgacacaaagcagcgttaagaaactggcgatattagcgatgatgattgccttagatgtggtgctttcacccttatttcgcattgaagggatggcacctatgtccagcgtggtcaatgtcgtggcagctgccatgatgggaccgctatatgccaccatcatggcctttggttgtgctctgattcgcatggcattattggggattccaccgctggcattgaccggtgcaatattcggggcgcttttagctggccttggctatcgttttggcaaacacatttggtgggccgccgctggggagattcttggcactggtttgatcgggtctttactgtcttatcccgtgatggtttggttcaccggcagcgcgcaatcgctctactggttcgtttacaccccacgtttttttggtggatcgatctcagggtcgttaatcggcttgtttgtcctatatgaacttgatcacattggcatcaccaagcgtattcaaaaaattttctaggaggctttttccatgtcaaaagtaatcactgacgttttttacaccgcgttcaaaaccgccctgccattaacatcatccccactggtgcaatgcattaccaacgaaataaccgtcgaatccatggctaatgcattgctttacattgatgcgaagccggtcatggctgatgatcagcgcgagttcccggaattctttgctcaaagtgatgcgttgctgttgaatcttggacacatttccgaagtgcgccagcagaatctattagccgctggcaagtttgcgcaggccaccaaccagccaacggtgattgatttggtcggcgtttctgccacccagttgcgctatgacttaggccatcaattgttagccaatcatccgaacgtggtcaaaggtaacatttctgaaatgcgtcgattcgctgatctaaaaagcacaggccgcggcgttgatggaagccagttagatcaaagtgcgaccgccttgggagaactagccgcgagcttgcagcagctgacccaagcgtttcccaccactaccttcttggcaaccggcaagattgatctcgttgtgagtgcgaaggggacttggtatttgaaaaatggggtgccgcagctggatcgtttcaccgggactggtgacattgtcggtgccttgattgccgcgctgttggggacaggtttggacaacgacgcagcagtcgtcgtggctgtgagttacttcaactgctgtggcgaagtagcagctgcgcagaatcgaaccggcggactggcggcatttcgcgaaggtaccttgaatcaactttccttactggccgccaccgctgactggcttcaaatggtgaaaggggaagcgttatgaacgcaacggatctaaaactgtacttagtcacccatcgttacgatgacaacgaagcaacttttttggctaaaatcgcggctgcttgtgaaaatggcgtcacgatggtgcaattacgcgaaaagatgctgagcactcgagcctattttgaattggcacaacgggttaagctcatcactgaccgttatcagatcccactgattattgatgatcgcgtcgacatttgtttagctgtagatgcagctggtgtgcatatcggcgatgatgagctgcctgttgcgatgacccgccagttgatcggtcctgacaaggtattgggcgtttccacaaaaaccgtcgagacggcggttgccgcggttgccgctggtgctgattacttgggggttggcgccatttttccgacgcagacgaaagcaaacgcgccggtgaccccgattgcgacattaaaggcgatcaccgcgcaagttgccgtgccggtcgtggctattggcggcgtcaaagaagccaatttggggacgtttaaagagaccgggatcgccggggttgcgattgtgagcgaaatcatgcaggcacctgatatcgctcacaaagttcaggctttgcgcacgaagttaaaggcggtgttaccaaatgaccgttaatcgtacaccgcaagtcgtcaccatcgctggttccgattctggtggtggggcagggctacaagcagatttgaaaacttttcaggcgcgacatgtctttggaatgagtattgtggtggcactgacagcgcagaatacgtatggggtccaggccagtctgccgattcccgggggcttcattgacgcccagtttcaatcgttagctactgactttaacattcgcgcggccaaaacggggatgttagcggatcgtgagcatgtcgaagccgttgtccgcaatttgcaacaggttgattttggcccactgattgtcgatccagtgatggtagccaagggcggcgcgactttgcttgcctcggaagctgtcgtcaccatcaaagaacagctgctcccgttggcggatgtggtgacgccgaatctacccgaagcagaaattctcgtgggtaaaaaaattgtgaccaatgcggatatggttcgggcggcgcgtacgattcaaacacttggcgtcaagcatgtcattattaaagggggccatcgtcagaatcacaaggccgaggatctgattctattggctgacggtacgtgttattggctcagtgcgccacgaattgccactgcgaacacgcatggaaccggtgataccttctcggcatgtatcgctgcagagttagcaaaagggcagccattgaaagcagctatcatgacagccaaagcctttctgcaaggcgccatcagccaaggcatttcagttggccatggccatggcccgacaaatcactgggcaaagttgagtgaaaaagtgagtttgcgtcaaggttaagaaggggtgccgaagatagaaatgtcttcggcgttttttgaaaaagccgattttttcaagcatgttgttgtgaaacgttaccaatccctgcaaaataaccacgcaaagcctgatcactaatgatagttgtgttgtgaaacaatatttttctagaccactttccactatactgacatcaaagagggcgcgatgcctttgatggcggatgaacgtgacgcttcaatggatggtaccaattcatgacctgccaagttggcggccattttggggaacacgcctagttactagccagtcatcaagaggctatcaaaccagcctgcatcccgatatgtgaccagtaccgagctacaggcgctcttagtttgtatttggaggctttgaattgtgcaagaagaagaactgacgccccggcggtatatgagctggccagtcttaagcttacttgtttttattacggtcattggctttgaaaatattttttatccttttcagaaccaagggctttccgttgttgttaactgggtcatcctgttagtgatttatatcgtgccgtacgccttgatttcggcacaattagggacgacttttacccgggctgatgaaggcggtggcttggcgacttggatgcgccgcacgctaggggacacttggggatactggacaagttggatttattgggctcagaccctgccatatttagtcgatgtttccaacgctgtcatcgtggcgctttcctggatgattctgggtgataacagtttgggtaaacgaatgtcgaatctgacctttggcctgctgacttttgctatcattcttttatttattgtgttggagaacctgttctccagatcacttgaggtcatgtcgctgattggcggtgcggcgatgtttttgatggcggttttgttcgttgtcttgacggcggccggtttggccaaaggcatgcattcggcaacaaactttagttgggccgcgttcaagccacatttttcgctgcattactttgccacgaccggactcttgatttttgcgacatcaggggcggaacttggcgccacttatgttgctcagttgcgcaacccgaaaaaagagtttcctaaagccatgtgggccctggcgctcatgaccggttttctggtgatttttggatcgttggcattaggcgtttggttcaatgccaaccatctgccagatgatctcaaaatgaatggcgcttattatgccttttccatgcttggtcaggcgtggggatggggcaaagtactgatgtatctgtttgccatcacgcaattgctcttcatgctcgcccagctagcggtgttgattgatgcttccagccgggtattgtcagccgacaccgctatgcggttcatgcctaaatggttgttgcagaaaaacaagcaaggtcggccaatccatagttatatttttaccgcctcactttgcctgttcttgctgttgctgtcagggacgctgccgaatattaatgccatcttcaactggttactgaatttgaatggtattgtatcgccatacaaaacggcgcttgtctttgtagctttcttggcattgcgggcgcaagcagacaagttcacttccggctataccttcatcaaaagcaaggccggtgcttatctagttggcggttggtgctttgtcttcacgttcatctgtgcgacgcttggtttcttaccacaggaagttgttttcggaaccaatggctggacccatcaactggtgatgaatatcatctccgtgatggtactctttggttttggattcatcatgccgctgttagcaaggcgtgatgttaaaaaagaacggctcatgtaagccaatctaaatgatgaggcgtcaccacaatgttgcgggtgatgtttcatcatttttgaataggcattcaaaatgtaacgacattttcgtagtcaaaggacaataatgatggcaatttcgacgattatcggtctattgacgacgtttaaaaaaggaagtgccatcactttgatttgtattgtacattcttcttgaacagactagcacgcaatctaaatatcaaagggagaataatccatgaacaaagtgaattggcttatgataaattcgcatattgaaggcatgaagcaagaacagggtcagaatgatgtctaatgagttgagaagtgattggaaagattttgcagcgacagcaatatcgtttttggtatcaggggcgtttatggttttcctaatcatgccaattcccgattttcaagaggatttggtgttgtcgggcattttggctgctatcatctacatcattgtcctcatagtcacattgctagcgttgaaaaaagatgaaatgaaacgctttatcagcttcttcaaaaggcagaaatcggatatgtgactaagcaaccacctttcacgctaaaaggaaggtggttgctttttttattaaaaaagttccacaagcttatacaccgtttcacgagcgactcgacgtcaataagagaatctgttatacaacagaaaaacgaaagacccaatacagatgcgtctctcaactagcagttcccgaattttggcctaagttttataaacacactttttagtatttgatgaggcagtctttatacaggataagccctctttatgctcatattagcctattttgtttcatgagaaatgaatcttggtagttgacagcgcttccaaaatcaggttaagctgatcttacaagattaagtaaaacgttttacctagcaaatgatttaggtcgtggacagcatgaaaaagaagatttcgattactgatgtggcaaaggaaactggtttgtcagtcacaaccgtttcacaaattttaaatggtaaaggggaacggtttagcgaaaaatcgcgaaaacgggtgcttgctgccaagaaggcgttgggttatgaaccggatttctttgcccgtgggctggttggtaagcgtggcaactcaattggtgttgtgatacccgatatcatgaatcccttcttcgcgagttttgtggtcagtgtcgaaaaggcagccattccacagggactctttccacaaatcttttcaattaatggtttccatgagaatgttgattattttattcgtcagtttttaggcggtactcagcgtggtttgattttggcggcgccagaagcgtcacaggagatcgttcaaaaagtggaagatcagctccatctgccaatggtctttatggatcaggctaccacgctgatatctggcgacagcattcgaattgatgattttcatgcaggttttcttgtcgctgaccatctcattaaacgtggtcaccgccggattgcgctagtattgccagagccgctgacctttaatctgcgggatcgtctcgctggttatcaacatgcgttcgattcacataatgttgcacttgatccgcagttaatcttccgcgcaacatttgatccggaaggcgggcgccaggctgtcgaccagatagtcaaaactgatgctactgctattattgcgatcaatgatgatgtcgcaagcggtgtttaccgcgggttgtatgagcatcataagcggattccagaggactacgcggtagttggcttcgatgatgtctcacaggcgcgattcatgacccccgggttaaccacgattgcgcaaccaattgacgaacttggccaacgcgcgatcgacatgttgctggcccagatggctggtgaccatcaagatcgcaacgtgattgaactgccagtgaagttgattgagcgcggatcgacaaaacggatttaacgcataacgtgcatcttaaaaaaatagggtgcagatgccgaataagaggaggcgttttgattgaaaaaaggaacggttattaacacgcaactgtcacaagtcattgccgatatggggcactttgatctactgggaatcggggatgccgggatgccggtgccagaagatacctggaaaattgatctagctgtttcaaaaaatctgccgagttttattgatgttctgaagaatgttttatcagaattgcaagtccaaaaggtttatctggcagaagaaatcaaaactgaaaatccggaacaactcaagcaaatacagcaacttatcgatgtgccaatcgcctttataccacatgatcaaatgaaacaagacctcagcaaaaccaaagccttcgtccgcactggcgaaatgacaccttattcgaatattttattggaaagcggcgttgttttttagagcgtgagccagaccgtttagagagcgtgaactggcgcgattagaaaccggagcataagtagcctcaagcctaaatggcttttaggcttgaggctacttatgagcagatttctgcgcaaggcgaacgcgtttagaaaaagcaagcaccagcatgtacttgggggaatcacaatgaagatcgaaatgaagaagatcaccaagagttttggcgccaatcgggtccttgaaggcgttgatttcaccgttgagtcaggtgaagttcatgcgttgatgggcgaaaatggggccggaaaatcgaccttgatgaatattctgactggtttgtatcaagcaaacagtggcgagattctggtggatggtcagccaaccacgtattcagggccgatggaagccgaacagcatggcatcagttttattcatcaggaaatgaataattttctagagatgtccgtggtcgacaacatgtttttgaataaggaactgcgcaccaagtttggcttaatggacaataaggcaatgcgcgaacaggcggcacattatcttagtctgctcggcgccaaacttgatgttgaacaaccaatcggcaacttgagtgttggccgtcagcaaatggttgaaatcgccaagtcactcatgaccgatgccaaaattatcatcatggatgaaccgactgcagccttgaccgaaacggaaattgaccaacttttcggggtggtgcggcggctcaaggaaaaaggtgtgggctttatctatatctcacaccggatggaagaaatttttgaaattgctgacaaagttaccgtgatgcgtgatggtctgtcaatcaccgaatacgccaccaaagatgtcaccatgaaacaactagtcaaggacatggttggtcgcgagattgacgatttttatccggatcgtacgcctgatcacgggccagtggcgatggaagtcaaaggcttgaccgaaaatggcgtgttcaaggatgtcagctttacggtgcatcaaggtgaaattcttggtttttcaggattgatgggcgcgggtcgaacggagatcatgcgggcaattttcggcattgataaataccagtctggtgaaattttattagatggcaagccggtcaaaattcgcgatccgcaagatgccattcgccataatatcggttttttaaccgaaaatcggaaagatgaagggcttattctagaagattcgttgcatgacaatatcgttttgccttcaattgatggcttcgtcaaacatggcttagtggatgataaggcaacagatgaatttgttcggatgctaatgaaaaggcttacagtcaaggcgatgggaccggatgtctccgcaggcagtcttagcggcggcaatcagcaaaaagtcgttttggctaaatggatcggttctggctcaaaagtgttgattctcgatgaaccaacgcgtggtgtggatgtcggggcaaaacgcgaaatttatgacttgatgaatgaactaaccgatcggcacgtggcgatcatcatgatctccagcgacttgccggaagtattgggcatgagtgatcgcattgctgttgtgtatgaaggcaaaatcactggcattttagatggaaaaaccgcgacgcaagagtcgatcatgacactggcaacagggggagtggaagagcatgcaggagcaatctaaagcaaaaacaagtagcaaaattgatgtgaagaaaatatttagtcggctaggaccgttattggcactggtggtattggtcattctcgtgacgatcatgagtcccacctttgtatcaccggctaacctattaaacctgttacggcaagtctcgattaacgcagtgattgccttcgggatgaccttcgtgattttgaccggcggcattgacttgtctgtcggttcaatcttggctttatcaggggcagtcacagcgtccatgcttgccagcggttttgcggccccgcttgcgttactggcaggcctcgtcctcggcgccattttcggcttgctgaatggtatcctgatcgcttatgggaaagccgcgccatttattgcgaccttggcgaccatgaccattttccgtggggccacgtacgtgttcaccaacgggaatcccatcactggcgctaaaatgaacagcagtttcttattccagttcatgggccgcgggtatctgtttggcattccattcccgattatcatcatgctcgtggcttacggtgtgctattcgtcctgctacacaagacctcttttggtcggaaaacctatgccttgggtggcaatgaaacggctgcccggatcgctggggtacgcaccaaaatggtcaccatgctgatttacacgatttctgggttaatggcggctattgccggtatcatcctgacatcacggttaagctccgcgcaaccagatgccgggacatcctacgaaatggatgccatcgccgctgtcgtccttggcggcacatcgctggccgggggcaaaggccgcattttcggcacgctgattggtgcgttgatcatcggcacactgaacaacgggatgaacttactgggcatttctagtttctaccagcagattgtcaaaggaatcgtaatcttgattgcggttctgctcgatcgccggtcttctaataatgggtaacaaaacgtgggcgcgggctcgcggcaaaagacaaaactctagggggagaaattgacatgaaacaatcactcaaacgctttttaatggtcgctgttgttacgacggcagctttattcaccttaaccgcatgcggcggcacaggactcagctccaaatcggacagcaacacaaaagtgaccaagaaagcgcccaaagatctgaaagttggcgtctcactttcaacactgtccaatccattcttcgtttctgttcgtaatgggatccaagatttagccaaaaagaacaaaaccaatgttcaagtttccgatgctcaaaatgataccgctaagcaaaacagtaacattgaagatttaattcaaaagaaggttgatgtgctgatcatcaacccagttgactcaagtgccattacaccagccgttaaagatgccaatgatgccggcatcccggtgatcaccgttgatcggtcgagtgacggcggtaaagttttgaccttagtcgcttctaactccacaaaaggtggtcaaatggcggctaagtatatgatcgaaaaacttggtaaagacgctaaaattgctgaattgcaaggcattccaggtgcatccgcaacccgtgaacgtggtaaagggttcgatggcgccgctaaaggcaaactcgacatcgtgtccaagcaaacagccggctttgaccgcgctaaagggctgaccgttaccgaaaatattttgcaaggtaatggtgacattgtcggtatcttctcgcaaaatgatgaaatggcattaggggcggttcaggcagtcaaagccgctggtaaaaagatcaccattgtcgggttcgatggcgaagcggacgggattaaagccgttaaggccggcgacatggctgcaacggttgcccagaagccagaagaaatgggtcgattggctttacaagcagcctatgttcatttcgacggtaaaacggtgaagaagaacgttgaatcaccattgtcacttgtgacaaccgaggatgcgaacaagtaagcttcatgctacgcttaaaattaaccggcactttggtagttaagttagaaaagggggccgacttatcggccctttttaattagagcgtgagcaggccgttttctggacgagcgagcgcgtttcaattggaggaaatcttatgcctaatcatgttgttgtcatcggcagtatcaatgtcgatagcatcttgcacattcaacggttgccacaaccgggagaaacgatcaaaatggacaccttttcgcaagcggctggcggtaaaggggcgaatcaagcagttgcggctgcgcgttcgggggccaaaaccagttttattggccgagtcggtgacgatgccaacgctgccttcatgcgcggtgaacttgtcaagaaccaaatcgacacccaatatgtggcgacaacggttggcacgcaaaccggtcaggcttacattttgctgcaagcctctggtcaaaattccattatcatccagcatggcgctaattttgaggtgacaccagcagatgtgcaacgagcagccgacttgattcagtctgccgactttgtggtcgcggaatttgaaacaccggtggatgcgacggcagaggccttcaaaattgccaaagctgctgggaagatgaccatcttaaacccagcgccggcacagaaggatttgccagcagccttgctgaaaaatgtggatctcatcgcaccgaacgaaaccgaaagcgagctgatcaccggcattccggtggtagatgaagacagcatgcgggcttcggcagcttattatcatgaattaggtattcgcggtgtgatcatcactttaggatcaaaaggctccttcatctcgctggatggcgaagcaaccatcgtgccagcctttaaagtcaaggctgtcgacaccaccgccgcgggcgacacgttcattggtgccttggcaagcgtcttgcagacagatcttaagaacattgtcacggcggcgagctatgccagcatggcaagttctttcacggttcagaaacttggcgccttcccgtccattccgatgggggatgaggtgcgggcggcgttagcgaaaatcaagtgaggttataacgagtaaatcactggatcaaaacctaccttaatcaaaacaagaaagctggcagtcgtgcttacctcacacgattgccagctttcttgttttagttgaactgagagttgatctatcgcgccctgattatacgtttggtagatcgtggcgcttggctttaccagccgtaatttgcgcgtccccacggcgaattcgggccatcagttccgggttactaagcaaatacatggtttcttcggtagcgtcaaaatcgcgtttgctcatcaccacaacattgtcgtctggattcttgaaagtgacgactaatgggatggcatcttcattgacttgtttcaggtggtctttaagatgctgcttgaaatgatggtagctcattgcatccatgggggtcatccttactgttattcaaacctaataaagactagcaacataaggcttcatcgctgtcaccacatcgtcgctgccagtaccttcaatcaaagctaccgtgagataggtgttcttatcagcatccatggcgactaaaaagccattttctttgccgtcagtgtcttgcttttgcttaagttcggccgtgccggttttggcagcgatggtgtgaccgtcaattgcgagattgtgggcggttccggcttgatcagaaaccacgtgggttagcgccgttttaaccgtattagctgcgttggcctgcaagacactgctggttcgtttgcctttcgtgccttgaatgagggtcggttgctgcatggtgccgccattggcaatcgtgctgtacatcgcggcttgttcaattggcgacaagaggagctgcccttgaccataggcggtatcggccaaaagggtttcggaagcgagcttaccagagtttgaaatctgggcttttttcatggtcagcggtaagtcggcctgggttttgaaaagcggtgcgaggcctttgaggtaagcggaggcgcccattttcagtgctacttgcgcgaaccagatgttatcggaattgaccaaagcctgcgtcatgttttcagaggcggcatcgactgtgcgtgttaccttgtagtcaccccaggagctgtctttttgccacttgagaccggagatggacttggtggtgtccggggtgatcgtcttattctgaagggcaatcgctgccgtcagcatcttaaatgttgaaccgggcgcatagcgttgcgcgaaacggctgaggaatggtaacgaggtgttgttggcatacttatcatagtccgtctggctgatcccgttgacaaaggcgtttggatcataacttggcgagcttgctaaagtcagtagttcgccattggtcggattcatcgtcacaacactaccagccttgccagcaagttgggtgtaggccgtcttttgctggttggcatcaatggttagcttcaggcttttaccattaacggcttttttagttaaaagcgggtgaatgttgtcgccgttttgaattgaaatctgaccaccgtctgtgccgcgcagttgtttgtcgtaaatttgttccaacccagttttgccaattttgctattagctgttagcgtcggatctttgcgaatgtcatcagccgtcgcggtgccgacgtagccaatgagctgagccgcagcttcgccaaggggataggtgcgtgagccgatcgtctgataggccgcgcccgtcatgactggtgaatcagtgacaattttgacaggcacgaaggtatcatctgtgacccaagattgctttaacaaggtttcaagactagtgaccttgacgtcccacgcggcagcaattttctctaagttggctgtgcgatcggcaccggttccgagcttaccgggaaccagcccagcttgggtcacatcgccattttttgccagcaactggttattgcggtcataaatctggccacgggtggccgcaatcaggtcaatctgcaccgtgtctttgccatccattgacgggaaaagcagacgtggcgaccactgtattcgccagttatcgccgactttaacaatcggcgcttcgtagtgttgcgcacttagcttgccgattttggtgttcatgttggccgtaaacgtcagctcgtaggttttgctgtcgtacttcttggttttgacgttagtaatcttgatatcactggcaccaacgcgatcaaaaaccgcctgattgcgcgccgccaaagttttggccgtataatgccaaccaggtccagtcaagtggctggtatcaacttgtttaactgctttgtcatattggcgcttagcaaacgcctgcgtataagtttgcgcagtggcctgaaccgcgtcagcttcggttttgccttgataccaatgataaaggccaaatccgccagcaatgatcacaatcgccgcggccacaccgccaataatggtgagggtcgatttcttcatgatagtttccccatttcctgattttgctccgtgtatatggtcattctactcgttcgagtattgtgaagaaatggtggtgagttaaattggttgaaaggctggcgctaaagatcagcaaatttgcttgcgcaagcaaataaataagcctataatacttcacagggaggtgagtgattgatcaaacgctggctcatactcatcacacttggtttattcttctttatggtgattattgatggcaccattgttgtcgttgcggtaccgaccatcgcctcggctttggcggtgagtccgagtcaggtgaacttgttgctgacggtttatctcaccacgatcagcgtttgcctgttgttctttggtcagttggctgatcaatatggccgaacgcggctgttcatctggggcacctatctgtttctgattggctctgggttggctggttttggcgttaactttcagttgatattggccgcccgagtagtgcaggcagtgggtgctagtatgaccatggccacgagttatgcgattgttgcggacgttttcccacccgccattttgggccgtgcgctgggcattgaatcgatcttcatttcagccggcgcattggctggccctggcatcggtggcctgatcctgagtcagttgccgtggggctatattttctgggtgaacttgccgattggtgtcgtgtgtttgttagtcgaatgggcggtttttccgcggactcatgcattttctgggaaaaaaagcgtggatggccgcggctttcttcaattgattgtgattggcgggttgttgttgctcatccagatcaacaagcaaccgttgttcaccggaattctggtcattttgattggcagctgcacctattggttttggcgtcatgagcggcagactgatcaagcaatgcttgatactcggttgttcagcaaccagctcttttcacggaatttagcggcttcgtttttgaactatgttgcggcttatttttttacgctgctcgcaccgatttatctacagttgatgctacgcttgccagtggccttgtctgggtatttgttgatgctgacaccacttgtttcgttggctgccaatccagtggctggggtgcttagtgaccgctttgatcgccagcgactcatgcgaatcggcttgctgatgctggttctgacgaatgtggcctttgccttgctgcctcatcaaacgacaacttggccatttgttatcgtgtcagtcgcgtttgcggttggcacagcgctgttcacgaatcctaatagtgtcgtgttgatgcaaagtgtcgatgcgaccatgcgcggtcaggttggcgcggccacttcacttgctaggcagttggggatgagtatcggtagcgccattgctggtttggtgttctatcaaaccctcgggatcgtcagcccgtacaccaccgccgtccacgccgctccgcaagctttatttgttgcgcagggtgtcagcttcatgctcgcagctgctctgtttttcatcgccgtcatgttgttacgaaagaaggtagaaaatgccaaaagaaccggatgaattgctctcaagagtcaatatcctagcgcgccacattcaacacgacttggatgttgcgttagcgccaaccacgctcagtgcgagtaactattactttatcttgaagcttggcaaagtcgatgaaatgcggcaggaaacactttttaaaacgattcaccttaatcccagcaacgtcacacgccgattggcccagctgattgcgttgggactcgtcgcaaaacgccgatccgacgaggacaaacgtgcttggattatcagcctcacgccaaaaggccggcgcttgatcccgatggtgacgcaaattgtggccgattatgaagccactttgacagcaaaactgtctgaagctaacaaaattgaatttgtcaggatgcttgatgtgcttaacgaaactgaaaaggggtcggaattttgaaaaacgatatgatggctttattgccaattcctgaagattatcacgtggttcaaacagacgtccgcaagcgaaataaagtgcaggtgacggtggaccgttaccaaaacgatgatgaagtgacctcgaataacaagcatctgacacttgtgactgatagaaacggcaacttgatcagttttaatgccagcaccttcaaaaatggcggtaaactgccgtcacctgataaagcgctacgccaggcgataacgttatttagtcagttagatcaaaattatgcagatggtttaagctacatgcgaaccgagcagcaagaacgccattatgaagataacgggatgcaggttagcgcgccagtttactggatcaagtttgcccatcgcaacggttcctataactgggtcaccatcgggcccgacaaccagattattgaaattgagcgcgagtcattttgggattacttcagaaatcgacgggcaaccgaaatgtggaactatgacaattgggttttggcgcgacaaggcaagatcccacaattagcagcacctgatgccttagcgtaaagaggtgaccgaatggcaaaagcagatttcgatacgcttgtgacgcaactgggcgacttgcgtgaacgtgcacggcgcctagcagacgaagattatattagtgccaagtacaagggctatagttccgagggtttgacattggaagaagtcatgggggcactggaagaaactgaaggcgaaattgagaaactggagcgtcagttagcacgatttgacgatgaatcatagtgctttgaaatgagaagatggtttgaaaaggtaacttgaacattcggttttgcagaaaaacatgcagcgcaccaaggcttggcatagcagccagaccttggtgcgctttttggcatctgggagatcaatttgagaacctctttttgtcaatcagtttccggatcttagaatgtgtgtggtgattaaagattttcaacaacctcttcaaacaagagaaccagtgttagcaacgccagtttcggaaccatttaaacttattaagcttttcagggaaacaataaataagacttgatagaacatcattcttaaaacgatatatttgtatcattttttaaattttatgcttcaatataattgataatatctatttatcttgactttcctttgcatgtaaagtatattaacgctaatctcatgattatatcatctaaatgccacttctttcacaaaaacgcggataatggactacgggaaaaaattagcaggaacagcctgctagacagcgccattctcataagcaatgaattttagaacacatctggcgggttcttatctacccaagatggtggttccttcacatgaagtgatcttccgggaccacaaacaactccgtatgatggtgatgcttatcaataccggttcgccggtccgcattgggcacaaactagtttttggattggacaattaaagtaacaatcgaatgaaacctaggtctatgagcttaagaaaaggcggatctgagcaaatccgcctttttgaatacttatcaatgagccaatatgtttgcaacttcgtaggtttgacttgaaagagaagatgggtgacttttatgttgcaaaagttgagaaactcgaattttgtcacgataattttggctgccaaagggacgcttctgatatgctgcctattgctcttctgctatttactattttcaactttgacaaatacgtttttaattcccacgaacgaccttttaggggatgtggcttcaattttaaaaggagagctctggcgcgttataacgagtactgtgtacttttctgaatggacgcctttaattaagacggttcttatagttttggctctttgcccgtttatagaatggaaaattggcagtcctgcgcttgttatgagcttttttgcttctagttggatcggcatcttgttattttgctttggacttggtggtgtcattcggtcaacagttggcataaacacctacgtttatgctttttatggcggcacactgtcagtctatgcgttatttccactggcagcattggcgttcttgataaagaaacctgccttttctttgttggcaaagtgcgttttagttggcggtcttctgttgtactttgcagtggggttttggccgaattcagatacaccagagcctgcagtcattgtgcagattagtcaattatgcggtgttctttccggccttttctgtgcccttatagtcgtggcgctaagaaattggaagaaagtttctttcttttctgccaaaccgagcaactgatcttataagacttaagaaaatttggtgctaatgatgctaatgaaaagaaaacgggtgaattttatgttgttaaagttgagaagacccaatcttttatccgtatttttgaatgctagaggaacattccttatctgctgtatattgatagtttgttatcttttgttttcgtttttaacgaatgttcttttaataccatcagctaactttgtcgggagtataccttcaattttaagaggggaactttggcgagttgtaacgagcacagtttaccactatgaatggtcacacttaatgaagaatatgcttgcagtgatggtgcttggacctttcatcgagtggaaaattggcagtacaccatttgtcattagtttttttgtttctagttggcttggtgtcttgctgttttgcttcggattcggcgggttcattcaatcagcgtttggaataggcacctatattgaatcgttttacggtgtgtcattgtctggatatgccttatttccactcgctatattggcatttttaatcgaaaaacccacattttcctttatgacgaagattgttgcatttatatcgattctttattacgtcatagtgggatattggccgaatccagacatgtcagatattgaaaaacttgttcaggttgcgcattcatgcggctttcttgctggtcttttctgtgtatttgtcatcttgataataaagcatcggaagaagatgttttatttttcaagtcgatcaaaatgattgatcacgcagatgaaggtgaatatgccgctatttgagtttgataattcggatcaaaattaatgaacgaaaacaacccaatttaatgcctcgctttgcgcggcacctgttcgatcgagactctctcataatgtgtcacaccatagtgaacgttatacgtgagtcgcagcagttgtcctttggggaaggggccagaatcatattcgtcggttttaaacgcaaggaccttctctcggccagtggcatctttcgccgttgcccgatagcgatagcatttttgttgcaaattaaccggaacggtcacggagaatttactaagtggccggttaactttgatgtagtatgtggtgccgccatctctgtatgaagtccaccataaagtcagcccaacaacaatgagcaaagcacttataaatccgactttatagaggttctccactgttttggtagttagctttttcacgctaagcatttcccttctgctttaaaagtagcctccaaaatcattctagcagcagtgagtatttaacgtaatgatctgatgaaggcaccagaaaactgaatctcattttttgatcgcgctggtcatagttggctcggtttgttgaaaaatgcatcgtgaccggttgctctgctgccaaaagattttctgcatgcgcaatccgcttgttgtttttgtcaaagatagtatcagtttgattgctgatgccataaggaatattcaaccacacgttttccaagtaattaaagttattctttttttgaccgtagtttgcggatcctttttgttggatggaaattgtgacggggacggtgacttggtctttgtttttcaggacacgcgctttatttaccgtaaaatcaacatttttggcatgaacgagttgaccttctttaatgaagacttcatgagtgacccctttttgtttagtatttgcgttgacttggtggtaccgaaatgcaccaccaataccaatcaaagcaattaaaccgataatgataacccagattttggttttagatttcatgactaatcgtcccttctttgacaaatagcttatgggttgccacttgttcgacaaagtcatgatcatgcgaggcgatgatgaaagttgatccgttcgcattgtaggcctgaatcagttgaatcaatttaatgatgctgttatgatccagggcatttgtgggttcatccaagataatgagtggatagccgcctaaaaaagcttcagcgattcccagcttttgtttcatacctaatgaaaacttgcgaactttttgttctggaaacctcgtgagttcaaaataatctagtaggttatgaatctgctttggctgtaaagtcgtatccaatctggctaatagctctaagttcttataagcgctaaagtcatcaatgagactaggattttcaattaagataccagccttgatgggataggcttcttgaacgttgacggattttccggcaacggatacatcacccgtcaccgtcatgagtccaagtaacgcttttaaaattaacgtctttccagaaccattaataccttcaagggttgtaatgctgccacgctcaatctcagcgttcacctgatgtaagagctcacgatgtttaatgattttactgacttgatgtagttcgataaaagccataaaaaattctccttcagtttaagttgaggctacgttcgatgattaagtaacctagtcccgtcaaaatattgatactaagcaaaataagaatgggataccaagtacttgtctctgtgatgcgagtgagcatgagatagctcactggattgcgccgaaatgctgtatacgcagtcatgatgagagtgctggcaggaatgattaaagccaacggtgggttaaaacgattgccaatagcctgaagcaacaagagtaagaagacgcccagccacgtgatacaaaagagaccgccaaccgctaatgcgccattccaatttccaacgtgaagctctgcagaatgggcagtcatagcagtgatgagcatgacaattatcaataggacatcatagacggttgtgacgagggctattagtagcaaattgaccttagaaaatcttctgggggaaatttgaagtccccgtaagtgcagcgttcgagttcgccacagttgttgaaaactattaaggagaattaacagcgggacaaagaagtaagcaaaccataatatgggcagcgtgacgcggtgggtttcaacggtggcgtaactgacgccatcaaaaaatagtgagaagacagttagatggggatttccggcaattcgcgtgctcaaaataatcaaacttataaagatgagccagaaaagaaagcgtgtccgaataatatgccagaaaaatagaaattggttgttaaacaatcgccacatcatatatccctcctgttgacgatgaacgtcattaagggaaccattaaaagcgcaatgcctagcatgatgatgcctttagaaatcagggcagcgtttgaatctagcgtggaaaaatcaaaaaataacgaaggtcgcctcgaaataacgaaagtgaaggacagactgttgatcccgaaactaataaagaatgcaattaatttactcttggttgcgattgcaagcatcacagtgatcaagccaagtagaaaaaccgcgatccataggtaaactgcgcgaatcaaaataggcaaccagaggtctcccaaaaaattcaaataaccgttgacagaaaggacgagaatattggcgaagccccaaatgatggccattggcagcattgtgaagcaaacgcgataaagcacttgaaggctaactatttttcgtgattgatatagcagaatatcttgtggacgtatttgaatcgcaggtagtaagcctaatagatacgttggtattaacccacaaaatatgagatggcgcggaaagattgtcgtcattagattttcgggtgaaaaatcagttgaactcatattgttgagaccagttaaactgatcatcagcgaaacaaaaccgcaaactagataaaccctgaagaaggctgtagttagcaggttttgttgtctgatcacattatgatacaagacgtttctccccaatctgagcaaggctgatgcagtaaatgatcatgagtaaggtcactatcccagttaccgtgaggttgatattcgcgtttggagataactcgtgcaagaaatcagccggtgagtaactcgccaaactagggagcgtcaaaaagctgttaagcattagaactaggatctgaacacatagtccggtactgagcgcaacaaaagagtttttgatccatacggaagtaaccatgacaaatacggagaaaagaccgccccatagacttgcaaatagaatcgatatagcagcatggagcagcggatgagcgtagtacaaaccgaccagcattgtattttgattgattaaaagaatattgctattcagtaaattatctggcctaatatttgggaaaattgtgaagtaaaacaaaaaattaattagcaacgcaattgcgatgattgtgaaaccggaaagaaaagctataccaacataagaacggatcactttttgaaaaggagaatgcagtttaactttcgctaataaaccagagtcagcgtcgttttttagtagcgatccagctgggatactggcaatcaaaggtaacaaaatgaagaaaatgatcggagtaaagttaaaaggatcaatcgacagccagcgggtataaggggattcacccacaggaatgaaattcaatatctgggtcatctgtaaacaactgatggctaatgcaattgacaccgcaagccatagccgctttttgggtagccgtaacgataaaaatgacaacatcaaaacacctcgctcaaaattaaatagcatccttatgaattggatcatacagtttttaagccgtagacgtcaacttatttttatagatgccattagttattaattatttttaggaggggaagcttgataagatcgtggcaatcaagttaggtgaaagggtgatcaaaatgagtttttcgctattgatgctgttgtttttcctagttggtatctcggtattcctggtaggcttaaagcaaagcatcgcagctggacgtggttaggccttggtctgtctgtcctagcagcaattatgtttgtagcggttgtcttccttcgttcctgcttctaagctcgctttcttgcaaaacgattaacgtttatatcatcaaactcaaggttaagttgagatggtttcgctactttgttaatctattcacgtagacaacaacataagggagggactatgttttgaaaaagtgggttaaaatcgcagggctgttggcgctgatgagtgtcgtgctggttggttgcagtagcggggcgagttcaaagtcgagttcgtcaagttcaaaagcgaacaaagcagctagcagcaaggtcactagcggggcttcacagcaggcctacacagatccgaagacgatgaagggcaagtatgatatcgtgattgtcggtgctggtggtgccgggatgacagctgccatcgaggcgaagcagcaagggatggatcccgtcattcttgaaaaaatgcccgttgctggcgggaatacgctgaaagcctctagcggtatgaatgccagtcagacgaaagttgaagctgcccaaggggttaaggacagcaatgatcagttctatgaagaaacgctaaaaggtggcggcgggacgaatgacaaagcactgctgcgctattttgtcgacaactcagccagcgccattgattggctcgactcgattgggattaagctggacaaactgacgatttccggtgggatgtcggtcaagcgcacgcatcggccacacgatggttcagccgttggcggttatctcgttgatggactcgtgaaagaagtcaaaaaagaaaagattccgctgtttgtgaactcagatgttaccaagttgaatgaaacagatggtaaaatcagcggggtcaccgtcaagatcaatcaagacaagacgaaaaaaatcgcagccaaggccgtgattgtgaccactggcggtttcggggcaagtaagcaaatgatcaagaaatatcgccctgatctggctcattacgttaccaccaaccaagctggcgcaaccggtgatggcatcaagatgatcgaaaaagtcggcggctatgcgatcgacatggataagatccagattcacccaactgttaaccagagcaagcatattctcattggggaagcgactcgcggtgaaggtggcattttagttaaccaaagcgggaagcggttctataacgaaatgaatacccgtgacaaggtttccgctgccattaacaagcaaaaaggtaaggatgcttgggtcgtgattgatacaggcgtccgccaacggtcgagtgccattgacttttatatcaaggataagctcggtgtcgaaggcaaaacccttgatgaactcgccaagaaaatgaaggtgccagcggccacgttatccaagacggtttcaacttggaacgaagcggtcaccaacaaaaaggatgccgagtttggtcggacaactgggatggaccatggcctcaccaccggtccttactatgctttcaaaatcgccccaggcatccattacaccatgggcggcgtgaagatcaacaccaagactgaggtgctgacaaagaagcaacaaccaatcccagcactatacgcagccggtgaagtcaccggcggcctgcacggcgacaaccgaatcggtggcaattccgttgccgacattgtgatctttggtcgccaagcaggaacgcaggcggcggcttacgtgaaagcacaacagtaacctgaatgacttaaaggcggttctcagcagatgagaatcgcttttttgatgcgctgaaaatggcggtgtccgctcaacccccaaaattcatatgccccataattgttaggcaggcaagcctagccgttatggggctttttgtcacttaccgaggccgaaacttgaagaatgatgagcaaggtgtacttcgtttcccaagttaaggaaaaaggttctacttttcggtatgtaagcgcttgcttagtatagaagctgtaaggaggcaaagcaatgcgagaaagattgacgaatcttctgcgaacattgttagacagttcgacaagttctttatctgatttaggcaagcaattcaacgtcacgacaaagacgattcgaaatgagatccaggttttaaatgaagttttggcggagaaaagcttgcccttattcgatatcaaaagaggtgtcgcctacaatcatatttcaacgcaacagcggcattcgctgtctgacgtccttgattttgacagcatcagtcaaggcgctttaatccctgagcaacgtgctgtgtatctcttattggatttgcttcaagccacccaaccggtttatctcgtcgatgaacaagaaaagatgcagattagtaaaagctcaatggattctgatctccgcaacttgcgggctgatctagcaaaatacaatctaacactcacgaccagcccaaagttaggcgcacagattgaaggcaacgagcgatcaattcgaacgatgtttggggatgtcgtaacacggcaacatgctttggtcaccttgattgcccagcaattaatcgccagtggtatgtatgtcgacaagatgaaggaagtctttaccaaacaagatgtgacctatatccgggacttactacgccgttgttttccaaaaggggccttggccgccaacgacatgtacagccagcaagtgaccgtcttgctcatcatctggttacaccgcgttcgcaacggacactatgtcaaagatgatgaaaccaccgtagatctcaataaggaaaatgccaaatttctcaatgaactcattcagcattatgccttaaaaattgatgttgccagcgagttaggttatgtcggttttctgatcaacagttttaatcgtcgcggtgcgattgatcttgacgactgggtcaaggcccagattttcagcgttgcgctcattgatcatatggaaactgaaattggctttccattttctaaaaacgaaaagcttttcgaagagctatataaccatatgaccgctttgttcaagcgcttgtcacagcacgtcaaagtggttaatccgttgagaaagacgatccagcaaggctatgggccgatctatgacgttcaagacgggacgctatcagctgaccatgtctgatgatgagaaggcatttctggcgatgtatttctcagcgacacaagctgaggatcgccagcgccaagactatcagtatcaagccgcagttgtctgcaacttcggcacggcgacgggcagagtgttggcagctaaactggaggaacggtttaacattgatgttcttgccgttttgagcacgtctgaagttggcattctccgcaaattaccggtcagcttagttttcaaaacagtcgacatgccaatcgataaaatcccgagtttgaaggttaatcccattccttcagaagttgatttgacccgagttgcagcgtttttgaagaaacacacaacgttaactaagtacgaaagccgtacgttagatccaacaagactatttcgcacagttctggatgtgttgaaaacccatcaggtgacagttgataaccgactattagctgatctgcaagcagcattcaaggagaaccatgtcgaaattaatgaaagggaggttcagcctatgttgaaagatttaatcaacgatcaccagatccagcttcaacagaaagctgatgattgggaagatgcgatccgtatttcagcaaagccattgcttgacgaggattacattaccaaaaattatatccaagcgatgattgattcagttaagaaattcggtccgtatattgtcattggaccttccatcgcgctagcccatgcacggccagaggatgggacaaagaagcttggcgtgacgatcaccacgctagcaaaaccaatcaactttggtaatccagacaacgatcccgtgaagatcatcttctgtctggccgcgatcgataattattcacacctcaatgtcatgaaagccattgtccagctcatcaatgatcagcaaaaagttgatcagctggcgcaacaaacagatattcaaacctttaaaaacattttattcaacgaaaagacgtcaaaggagacgatttaaatgaccaggaaattaacgatttacttcatctgcggtgccggactagggtcttccttagcttgccaaatgactgcagaagatgttttgaaccgtttggggttagacgaaaacctcgaacatgaggcaatttcgtcaacgccaggtttacggacggacatcattgtctcggcagaaaattttgcttcgcagttcaaacaatatgatctcgatccagccatcaagtttgtctttctgcacaacattgtggatccagctgaaatcgaagccaagctcgtgccagttattaaagaattgtcggaaaaatcagcctgaacaacagagcgtgagctggcgtggttagagaccggagtataagcggccttgaatgtgatggtcgggctttggccattgcacccaaggtccctatgtggcggtttccgcgccagtgatcgcgtttaaaagggggaatcaatcatggttgtggttaactttattattcaaaatattctgactcaggcagccatcaccattgcgttaatcgcgatgctgggcttgcttctacaacgcaagtcctttggcgcggtcctaactggaaccttcaagacactgctgggatttcaagtattatcagcagggtccgccattattgtcacagcactgacgtatttcggaaagatttttcaacatggttttcacctaaaaggggttgtacccagcattgaggcgatcaatggtcaagccatgaatacgctggggttgggaaatgaaattgccttaacctttttgggcattttcattgtcaacattatcattgcgcggttctcgccatggaaatatattttcctaaccggacaggcgctgttgtggatgtcgaccatgacggttgtcggcggcaagatagctggcttcaattcagtcgtgaccattgctgtcggtagtgtcatcggtgggattttcgcggtggccatgccagccattgcgcagccttttgttcgtaagattaccaagggcgatgccattgctttaggacacttttgtacgatcggctacatggtagaagcaggcgccgcttggatcttcggtgaacgtggcgaaaagaaacactcgattgaagacatcaagttaccaaagtacatggaattcttgcaagacacgtatctctctgttgctgttgtgatggtgccattgtttatgatcaccgcggcttttgcaggtcctaaatacgccggtaacggcacgagtctgaactatatcatgaatgccttcatgatgggcattcagttcgttgtcggggtctatgtcctgcttgcgggcgttcggctcttacttggtgaaatcgttccggctttccgtggtattgcgatgaaactggtaccaaatgcgaaaccagcacttgactgtccagtcttgttcccattctcaccaaacgcggtcatcttaggcttcattacgacaaccattgggaccgtcattggcatgttcttgatgcctgttttcggactcgcggtcattctgccggggatgttaactaacttcttcgctggcgggactgcagggatcttcggaaacgttgtcggcggccgccgcggggccatcattggcggcattatccacggcctgttcatcaccttgttgccagcgctgctagtcacggccttgacctcgtttggcttcgtgaatgcttcggcaactgactccgatacgatcgtggccatgctgatgtatgcctggatcctaacgccgattcttaaagcagtttaaagaaaggggcacgactatgtttggcagtttatttaaaaagaaagacacgcagagacacccatccgcggtgccaaaagaaggcaatcaatcactttcgacaaccgaagctgctgctctaaccaaaaaagtggcggcattgacgactcaaattgaacagataaccgatgataaagacaaacgccacctgctatacaaccaattaggcgctactcaggttaaattaggcaacgacttagaggcaatcgcagcttatgaagcgagtgtcaaagataaagaagagtttggggatgcatacaatgccttgctgaacctatacgagacgcagcgaaaacaagcggcaaaagcgaaaaatgatgacgacattcaaaaatgggtcacaaaaacggatgcattgctcgatatgtccaaacgggtcatgcggtcaggttttggttattaatctgctgggaggcaatctactatgtacaagaacttaaagcaattgatggatgaagcgcaagcacttgattatacagttggcgcctttaatgcgcacaacttggaaatggtgccatcaatgatcacggctgcaaaggatgcaggatcgccaattatcattcaaacaagtgttgcgacggctgaatacgttggcatgaagaactttgttgcggtttgcaaatccatggcgcaagatctgttagtcgatgttgatctgcatctagaccacgctaagtcatttgatgccattaaagaagccattgatgctggctattcctctgtgatgtttgacggttcagcgctgccgaataaggaaaacatggaacgggcacgccgggtagccgactatgcacatgaacatggtgtttcagtcgagtgcgaaatcggcacaatcggtgggactgaagaaggtgtgaccgtcaaggaaggccggtatactgacccgcaacaagccattgccttcttgaataacgtagatgtcgaagcactagctgtcggcgttggtactcaccacggtcaattcaaatcaaagaccgaattgaactggcctttgattgaagaattgcacaaagaaatcagcaaaccaatggtcattcacggcggtaccggcgtgaacgaagctgattatcatcgtttgaccgaaaacggcttccgcaagttcaatgttgggaccgaattattagttggttggacccggaaagccaaagaaatgttcggtcagaccgaggtcaacaactcgctgcggaacaacatcgaaccatgcaaccaagttgtctacgatatcgtcaagcacaagagtggcttgttcttaaataaagatgccgaagtgccaattaacgcgtaagtggggaagagcgtaacccggctgaagtcgacgtgtgactgtgatgaattgcgatcaaggtccttaaacgaagacttccgagctagggagcccgtctagaggagaggatgacatgatgagcgatcaaaagcagatcttggtcctgctagcaggtgcgccaggcacagggaaaacgatactgcaaataagatcatgcaagcaatcagcggattcgtctccctgccgctcgatctttttaaagaacatctttacgatgagttaggctttgataatcttgaggaaaagcaactcctcgatgcagaagcgagaggacgatactaccgcggcattggcatgctgatgcaggaacacaaaatgggctcttcgtcaagtagagttgatagatcttttgtgaagcatctaggccttaattggtctagatgcttttattatgctgctgccttgctgctcttagctctgaaccaaacccgttccaggaatatacgattgatgaaattgttccaattcgtatagccgtacgcagtgttcttaatcttcttgatgatgccgttaataccctcaaggaagccatttgagtactcatagcgtaatgcattgatgacttgtctcttgtacttctttaacgttttgatagactgatccattcggtttcctaatgatcgatagctctctagtgcggctgcgagtgctgacgcatcacgctttctaaccgctcctataatctcctggtagacttcatatgctgcccggaactccgggctcaggtctaagcacttggcgaccagatttacagttgtttcgtaatagccgacgctggtgtgatacgtgggttttattgcttcaagttcgttgaagtccttaagaaagattttccactcgcgtttcatgaatcggtattccttgctacgcttagatagacccttcattacttggatacggaccatgttgagggcggtcgacaccatctggacgatatggaaccgatccacaactatcttggcgtttggaaacaaacgtggaactaggttgatatagccggcgttcaggtctaacgacacggtctgcacttgctggcggacactgagtggaaagccttcaaagtacttcgttattgcgtatgccgtccggctcggtagaattgcgccaatctggtgtcgatcgccatcaccccagatgaagctcattttgttggtagctttgaactcatcaaaagccagatgcttcgggagccatagcttttgatggtagttatacttcgccgcttcttcatcaataatccgctggacggtcttatcagccacgtggaagcgtcgcgcaatgtcggttaatgaacagttgctgaaggcttcaaatagcaccatctggcggactggggtgctgatggtgctacgcggtcggacgtaatcagtctcactctgaaagaccgaccggcacaactcacaacgaaatctctgacggctaagcttcatataggtgggacggtagctgtaactgggcataagtacgcaggtacgttcaaacccataacgaactagtttgctggcaaagccacaggcagggcaatgctctggttggagtttaagttcggcatagaagacaagggctttagcgccccgaatttcttcaatgacagcgtcttgcgtaaagataatgttagggtccttgatttctagaaccattcggatagacttacctgtaagggacattacacaaactcctattctctattctttggtcgggacagtgaacgagcagaaagtgtaatgtcctttttgcgcgttcaaatatagaaatggtatagaaaaaggagctggtaggcaagctgcctatcaactccaaatatcgtagcgccacaaaatgattctgggcgactatcccttcagccgattacaaaaaccagcgctcgaaaaattggcagccaaacatcactatgcggttatcaccatcagattagaagcagacatcaaggtactctacgatcgccagcgaaaacgcgacctatccgatccccgtcatcttggtcatctcatgaatcactatcatcgcggtgatacactcgaaaacatcagcgaaacgcctgatggcatgccgacatttgaagtgtttagcaatcgcgtgcaagatcgaggctaccagacgtttcagctaggtcagttgattcgagtggatgtgaatgattatggggcggtggattatcggggattggtggaggcgttgagagaagcgattagaggcgttgaactgtcaacccgatagtgaaattagttatcaagatttgtgacttttaataatagtttgcaaataaccttgtcccgagctttggaaacaaggttatttttgtggagatttttgtaattgtaacgaagtgcacaagagagaatgctagatttgtttaaatagaaagctgtttatcaagagtgttgagaaaaaaggctcaactttatttaaaaataatcttgactagtgaataaattcacttatagtagttactgttggtagctaccattttgagactttcatttctgaggggagatgatgaattgtggatcctgaactaacagacttgttcaagcagtttcatttttctaagtacgagagtcagtgttacgtcacgatgcttcaattaccagcgagtaccgggtacgaaatcgcaaaacgatcaggtattccgcggtcaaaaatctatgaagttctgaatcgtatgacggaacgtggcattgttttggcaagcaagagtgatccaacgtattacaacgttatctctgctgatgaattagtgacaacactcggacaccaagcttctgcccagttggcacgaataaaaacacgattagcgaatgtggagactaaacaagatggtgaactgatttattcaattcccaacagaaaacagacacaggacaaactgtcagacttattagcgcattgcgagaagtcgctttacttacaaatctggaaagaagatatcagttcggacattttaggagaactaacacgactttctaagattcttgatcatttcgtcgtcattctgtttagtaatcgtcatgactatcacatgccttttacacgagtatatccgcactggtttgaacgtgataaactactggacttcggcggccggtgggttaatgccgtcattgatggtgctgaggttctttatggcactttcggggatgaaggtgatgatgtcatctatacgagaaatcattcgtttgttttcattgcgcaagaatatgtgattcacgatgcgtatgatctgagaacgctggaaactttagatgcagcagcaaagaaggcgtttggtccggatctcgaaggcgtcagagatatttatatgatggatagaaaagggaagaatgctcatgattaagatcttattgggattaatcgtactaattaatttaggctttgtattttactttatccgtgacttgctccggcatcgttcagaggttatgtcggaacctgcaacgacatgggcattgccatttagctcatttattattttcttactttcaacttttggcatttctgattttgctatcagtacggcactttaccctaaggctaaatgggtttcaattaagaaactgccaggcaccttaaacacgcaatgtgttgtccccgttgctgcaatggcactttcttacatcaccgccattactgtcgatattaaaacgctagccgtatgtatcatcgcggcagtcattggtgcttacatcggacctaggtttgttgttaaactgccagctaacacaattaagaagtttgtgacagcaggtctgattattgccgcgttaatgattttagcgggtaagttcaattggattcctgctaacggaacagcaacgagcttatctggctggaaattaatgctaactgcaatcctgctgttcatttacggtgctcttaacaacatcggtattggttcctatgctttgacgatggccacggtttatgcgatggggctcaatccatcagctgcttttccaatcatgatgggagccgcaacattctcagtttcaacgagttcgattcaattcgttaagttggctgattatagtcgaaaaatcacattattcacttcaacttttggtgtgctgggtgtcttagttgccgtctttttcgttaaaagcttagatactagtatgttacagtggctggttatcattgtgctactttattccgcaatcagcatggcattgtccttgcgtcaaaagggagaagcatagcattgctgtttcaggttcaacaattataggaggattatgatgcgcgttttaacgaaaaaggatgttcaagcagtttactcaatgaaagatgcaatcgctgatgataagattgcactggcagcatattcaaagggtgatgccaccgttccattgagaacgaatattgatgtcaaacctgataatgggcaaagtctttacatgcctggttatgcagccggtaaagaaccagcattgggtgtgaagatcgtatccgtttaccctaataacattgataagggtcttcctagcgttcccgcaacaatggttagtctgaacccaaagactggtattgtgtcagcaattattgacggtacttaccttactcagcttcgaacaggtgcgcttcaaggtgcagccactgatttgatggctaaccctgatgcaaaagtggcaacgctcatcggtactggcggtcaggcaccaacacaactagaggccatgctaaacgttcgtcaattgacgcgtgtttacgtttcagatattgataaagatcgtgctgcaaagtttgcacaggacatgacaagacgctttggtaagcaatttaaggttgaaattctcccagcagttgacttacaaaaggctattcgagcatctgatattatcacatcggtcacaacatcaaaacaggcgacttttgatgctgccgatgttaaatcgggagcacatatcaacggtatcggcgcatacactccgcaaatgcatgagatccccgcagaactagttaaacaggcagatattgttatctttgatacgatggatggcgtattagccgaagcgggagatatgatcagtccactgaagaatgggctggtttcaaaagatcagtattcaggtgagttaggacaacttattaatggcgatattaaaggccgagatagccatgaccaaatcacattgttcaaggccgttggcaccgccgttttagatgtcgttgttgctgaaaaaattttacaagcggcggcgaaagcagacaaagggactacgattgatctgtagtagattgaaggattaaatgttggtcggcattatttaaaactgcaaggctgaatagagactaagcaaaaggcgtcttgattgagagtgaaaattcttaatcaagacgcctttcttaagttgcaggagatttatcacgtgagacatagggtcttcaagggtcacttaaagctgtcccgcaaagcgcattagcagcgttagttatttgatcctttcttggcattaatcgttgcaccttaaccagtcatagtaggtactgcgggggatatggaacactttgagaacgacgtgcatgatacaggtgatcctgccagagttcaattcaacagatagcattaatgttaataaatagctttgatgtatataaatagaattaatagtatatttgttattgaaatgacgaaagtaagatggaaagcctacatcaaaaattgctgatgctatgtttataatataatttttgtttaatattttttgttaatgacggttattcgtgcatactgtaaaccaaatgatataatgacaatgtttggtcaataactaaggaggcagttttatgtctgagtatattactgtaaaagacggaactaggatatcatatgatgttcatggagaaggaagcccaatacttctaattcacggtgttactgactgtaaagagacttatgatacggatttgccgtttctaactaaaaatcaccgtgtttatcgttatgaccttcgaggccatggagcttcagatcatccaaagcatccatttaccctagagaaccatatcgaagatgcattagcagtcatctcaaaactgaatttgcacaattttgtcttgtacggtggctccttgggaagctacatagcagaagcagttgcaaccaaaattccacaagacttaagtggcttgattttgaatgtctccgctgcgcataatccagcatcagcgcttgctgacacggcaaagaatgacaatatccccttagacaaagttgaaaggagagattattggattcgccacttaaccattgataaggataatatcaagcaactaacagattcaggatttcaaaaaaacagcttgtctcctgaggatgaagatagagcgctaagatctataacggcatttgattttagaaatgaattgccaaaaatcacatgtccgaccttgattacgagtggtttgtatgatcccgtcaatgggccatcaaagggaattgagattcagaagtatattccgaatgcttgctttgtggtctttaaatcaggacatcttcaacgacttgagatgccaacagcctaccaccatgttgttgatgattttatcgaaacagtcgctcgctaaaatggcaatagcgtcaggtatcatcaactcaacaagaaccaacacatttgctagttttaaaagtgagtatgcgtctgctgaccaataatgaaaaacgtaacacatgcttgagaggataacgtaaaagcgagtaccaaagtcccttaggaattggtcaacacgttgtcacttttttatccctctatctaggagctttgactaccttgaaatcgaggcttttgtgttgcatcaagggagtagcggatagcatagtgcagaagggcgggcaaaatggccttagcgatttttaacttattgtcaataattttgatattcatcatcatttggcttacacgcaaagaaaaagtcgcaacgcgagcgggacgatataaccgagccttcttgattattattgcggtcatagagattgttttaattatttcggaaacatttattttcaaggattcaatttcacttcaatctgcatcattttcttgtagcttgttacttctgataaacctgttacttagctatagaatgcattaagcagcaaataagtgccatcacttttcaatcttatggaaagtgatggcactttttaaatggcgcacaaatgatggtaaagaaaacaatcaacgctatccactcgacgtaacgacggaagaaaaacggcagcttaaagcactttgtcgcattgtcaaggaatgaccttcaatatggttgcaacacttgatggtttccagaagggtattagatcggataaaaggctaaaacatgtcgaatctcctttttagccaacttaaaacaaaaattgtttcatgccttagtgatgaagatcggccaaggactgcttaagctctgctaggtatcgaacggctgtatttgttttaaatatctctaatctgttaattatcgtacaaactaattatgtcagaaactacagcgtaggagccgactttctactgaatttaaacaggctccgaatttttgaattgattttggtgaaatccaagtaattaattttttgatttgctataaagttaaatttttcagcaatctgggggctgcttaatgcttcagcaaccgattaaaccaaaatatcgaaaaaaattttcgattttttgacatttcaattgcggcttttgtgctattatcatgttgctttatgttgctttatgttgcctgcttatttatttattaacataaagtgcctatcaccagacaaataagcaagacaaccaaatatattaatttaaacttaaggagattaacatatgatctttgatactaaacagcactacaaaatgtacaaaaaaggcaaatattgggcttttgcggcaattacattagctacagttagcctttctagtcgtataaacaacgatactacagttcaagctgatactttgaatagcgaggcaaacactgccaaaaacgcatccaatggatatcaagactctcctcaaaaaacaaatgaacagcttaatcaggggtctaccgaaagctcggctctaagcaagacaagtattaatccgacaattaatgctaacactgcagcaaataattctactaatagtggtgacaaccaattaacgaataatgctccaactaataaaacctctagcaataatactattgcttcaagcaattcttctaacgaaagcacaaaggttaatgcgactttaagctcggtttctggagcgaatgtttcaatgacctcagacggtcttggaacaagctcctcaccagttaatggcgataattctgtcacatttactttttcacttagcacgattattgggaaacaagagctacatgctggtgatacgattgttctaaatgtagatagccagggcttaaattataataccgttggcttatctggaggagctccttattttagtatgacaaagagtccttcaacaaacacaattactttaactgcgacggaagacataaattggaccaccactgatccaatagtgttttcaatttatggaaaccccttagatatttcaggaaataacaatataagaacttatccaattacgtcgacttataatgataataaaaacaaccaaagtgttgttttgacaccatccaacacaaatctttacgtcaaaacgaatggcggtggaggatggaatgtcttggggtcaggcgtatatcctagcgatgtatggggcgctccttttagcaaagattatttcaataattatgttggtggtactgcaaacaatactggtacttatatatatagtcagaatgcaatgaaattcacggctggctatttcaacatttcatcttctgactatactgatggcgttcttaaagttaattcagattacgtcattgatcagaagtccattgttatatctattggtcggattggctcatatacggccatgcttaatccaaatattgtttgggatgctgatggtaaaggctttacgcttaatatcggttcactgcccagaactggaaataacagtgttgcagtcactttttttgtgaaaaccgcaagtattaatgataagcctactttaaattcagttttaacagcgttggatccttctggggctgcaactagtgtaaatggtacggctcatggaaaatatgttcccacgagcaatggatccttcacgcctaatatcactgcaagtgataaaacgatatacagtactcaaaagttatctgaatctgatctgttagcattagccacggcaaaagattaaacagatggagatattagcaaaaatataactattaaagaaacaggtgggtttaaacttgacgatacgaatgctgcaggtacatatactatcgcgtatgcagtgacgaatagttccggaaatacaagtacaacaacatctaccatcaccgtaaaggcagatcaaactagtaccaaggcaaaggacagcactttagtggctggcccagacaccaagtgtaatgcggcggataatttcgtgagcgccactgatgccgacggcaatgggattgatttcaagagtgtaaatgtatccggaagtgttgatccaaccaagccaggcaagtatgaagtgacctatagctacactgatgcaggtgggaaccaagtcagtgccaaggcaacgattacggttgtttccacaaaggcatcaattaaagcaaaggacagcactttagtggctggcccagacaccaagtggaatgcggcggataatttcgtgagcgctactgatgccgacggcaatggaattgatgccaagagtgtaaatgtatccggaagtgttgatccaaccaagccaggcgattatgaagtgacctatagctacactgatgcaggtgggaaccaagtcagtgcgaaggcaacgattacggttgtttccacaaaggcatcaattaaagcaaaggacagcactttagtggctggcccagacaccaagtggaatgcggcggataatttcgtgagcgctactgatgccgacggcaatgggattgatttcaagaatgtaaatgtatccggaagtgttgatccaaccaagccaggcgattatgaagtgacctatagctacactgatgcaggtgggaaccaagtcagtgcgaaggcaacgattacagttgtttcctcaaaggcaaatattaatggtcatgactccacaattgatcaaggtgattcttggacgccacaaaacaattttgatggtggcacggatgctgaaggaaatgtaatagactttagagaaattgtggttgaaggtacagttgattctaatgttcctggaaaatataaagttacgtagtggctgcttaaaaattctataattcaggcagttaagctaatatatgcattattgcggtataataaatccattggaattagctgttttcctgcattttccttgcattttttgggaacctactcggaggttatcgtatggtctatcgtcacagcccgcttcaattgtcatttgaatcctttggtgccggtttaagtaccccacttagctctaacaatgagtggatccagttggcggaggtcatgccctggaaagctctcgatgaggcataccaattggagttcaccaaaaatgcgggacgtgcggcaaaaccatttcgtttactctatggggcaatcctgatccaacaacggatgggtttaactgatcgtggggtggttgcggcaattcgtgatacacccgcacttcaatatttcatcgggttgtccgaatacaaagcggttgagccgttcaattattccagcctggcacactttcgcaaacgaattgccgatatctccgagctgattacgaatatcatgaatgatacagtacgcgccaagatcgaagcgttggtcccattcaaagtggacaccgtcatcacggacgcaaccgcagtgccagtcaaaatcaagtatcctcaagacaccgtcctcctcaaccaagcaaggctgaatcttgaggcgatggcgatcgatatggcacaccaacttggtgtgccaaacccacgcatgtacaaacgcgaggcgaagcattgttggacctcattttcacgacatccaaagcaacagcgtggtggctttcataaacaggtcaaggcccaacttcaatatgtgcgccgtgatttgcggtacatcaacgaattcatcgatcagggtgcgactctaccagatgaacaagcgattcgcttaggcgtgattcgaattctatttgaccagcaatggtacatgtatacccacaagactcaccacgttgaagaccgaattgttagtctccaacagccgtacattcgcccaattcaacgtggtaaggccaatgctaaagttgaatttggggcgaagattgactgttcgttaagtgaaggcgtagtcgacattgaacgttttgatttcaccgcattctctgagggccaagacttcgcggaaactttagaccactattacgaccttcatggacattatccggatgaagtactggccgatacgctgtaccgtaatcgggagaacctaaagctgtgtaaggatttgggtatccgaatctgcggtccgaagcttggccggcatccaaaacacgttgatgcagcgaaacggcgtgaggatactgatgccgagaatcgaagaggtaccattgaacgccggtttgcttttatgaagggcacgctggggcttggcttggtgaacactcggacagctgaatcactggccgtcaagattgacgcggccatcgtcttgagcaatgtgctgaccctgttaagggtatttgctataccaattttaattttggctaaattcgagggtgaggcctatcaaattcgctataaatttactacaagggtcgaagatatggtggcctagttcaacagccactatttagcgcttcatgatgctctgatggtgagaaaacatcccgcaaacttggccaacctgttagctacttgcgagccaaacggtgcggcaatagacatgacgaccgcaacacttaagcgacacaaagtcgctgttctcaatgccatcaccagccctattccaacggtccgatctaagggattaaccgcctcatcgagtcactcaaacgatcctgttttggcttcaaaaatcagcagaacttcttcaaaaaaatcacagcataatacgacaaagacggctccccaaatggagaaccgcctcaaatgataaatttattcttcaacatcagtcgacgtagagccaaagttcgaagtctgcccattacttataaaaagtatgacaaagttacttgcaaacgaatgcttaatgagatgaaatggcgcttgtatcaagtcgaacttttgaagatcttcccgcttaattggctgaatttggtttgagacacttatgcaatttgaatgccagcttctaaggtattatccaatttatagattcgttcaacatcaatgaccaccacgccagcgcgtgggaaacgatcaaagatgttagttttatctagaatctgattagcaaagtcatctgcttcatgaatatgagccgttccctcaaagcgaaatcccttttgagcgcctctatcagcaaccgcaaccgccgccaaatggttgttcgagagattattataggcctgcctaaaggtgtgctcaaagtagattaaatgtgagtcatctaagacatgtagtgaacccttgggaccaacttgaggtttgccatcttttcccgttgttgctagaaaggggagctgattctttaacatatttttcatttcttctgtaagatttaccatttgattttctcctatcaacgtaatactggctatttatttacttttagtaaatatattgttgagatactattttgtcaatcctatgtcccaagatgaacatcgcagactaggatcacggaaggtttaaaaagattcccttgttttgtaaattggttaagcaaacatgtttatatcgttggtcatgctcaggatagatgggtattgtgagtgcaaccggattgagttgcttgtatgctgggcaatgttgacctcgatacagaggatcataccatttctgatctggatgataacctcgtttttccatttcacgtaacacaatacagtgaaattgaaataatttatatggggaatgtgcaaatacgtaattaacggtagcgtgtttccgtccccatccattaccgcgaagcgccgcaatttcacgatgctgtcccaataattgttgtcttgggagttgctgaattaaatcttgatgccataaacgcacgttacggcttcctttcttggaaactagtcttaatatttatgccatttggaggattacagtactgaaccattttatgacgaagcgccttttctataggttcatcggcagtataagcaatgggattcgctccaactcggattgtctgatcaatttgttcaattttgttggtgtgattgattatattgctcttgcaaagaaatgatatccttttttgctgtctttggagcagcgattgcaccctccgcatgaacatatacacggtttatacaagatggctttgaaagtgaagtcgtgccacctaattttgagtcgttttatcttaactaatacctatcacgccgaatttgttattagatcgtttaagcgtagaagaaactaaaatattcaataaattattcgaaaaatttcggaattaacaatatactttttagtccgtttattagctttttatgattgatcttctttttttctgactgcaagcacccacaaatgcgcgtgatttccttttgaggtcagtggccgtcaacaatacatttgttttcacattggcattaacatagccaaagcgtgtcaccgttggaattgcttcctcaaaaaactaatagctgtgagtcgcccaaacggttgattgactaaattgatacgcctttgcatactaatttccgcttgatgaggaggcatttaaagaattactttacctcagttgacaccatgaaataaaggctagcctagattgcaataataaagttaccacctagaaagtggcttgctcactgcttgaactggggtttgccaacggagacattttctaggtttgttattgataagcgctgtggcttgttgaatatcggtctctgaaacctgatcaaactgtgttcccttcgggaaatagtagcgaagttctcgattgaaccgttcatttgtgccccgttcattcgggtgataggcgtggcaaaagtaaaccggtatccgatagcgctttgtaagcgcctgatcgcaggaaaactctttaccgtgatcaaccgtcactgatcgaaccggacccggaaagtccaccatcagtcttgcaaatcccttgagaacagcattttgtgataagttttcaagcttagttgtcgccattaaacgtgtcacccgatcgacaatggtcaaaacagcagcctttgacccgcgaccaccgcgaactgtatccatctctaaatgtcctttttcggttcgccgattagctgactcactgcgaatctcaattgaggtgcctactgcttggttatagcgcgaccgaaggtcttgtcttcttttatgacgtttaccgtgatcaaagagttggcttggctgaaaatcgacttgtctttgataaatccagtggtaaatcgtgtgtggcgcacagtgaacggcataaccgaccatttcaggggaccaacctaggtttagcttctcagttaccatccgcttcaacttaggcgttaaaatcgagtgccgaccacaacgatgccgacaagtatcggcatgatcctgagctataatggcgcagtaatcaccttcagggcaacggtgaagctcatgcctaatagaaatacgagagcggcctaaggtcgcggcgatgtattgaatcgtgtggtgttgcatcagttctatctgagatcgttcaattaaggttataatggccatgggacctgtccttctctctagatggtatgttatgcaaacaccattttagcaagaacggacaggtcttttttcacattttctgggtggtaactttaattatgcaatctaggctagttcgtcaatcgttcgaatgccttaagttctagtatacgtcaatttttgagtggttagtagttgatcggatagtttactaatgatagcccaatcacaattatatcgatgcttttgtcgatcccatgcacagtttttgcttctaggacagttgttaattaatatgcctgcaaacgacaataagatcgtgagtgcggtaaaggcaattcgctttcttcttataagatggcgacaggcctctttataaatataggttttttgaagattagctgaatgagacccatattcgaaaacgttgtcctgatattctcctgtttggcaatttcaatactttgttgttgtggcatctttatgggttcgtgattttcttgagcaatatatttatataaatcgacaatgattgctgtgatcaaattatgaaaattaaggccttcaatgctgtcacagctgggtagacttagaaccttcaattgaacttcacgataccgaatggcctcaatgatattagtcaaatcatgagaattgcgaccagccgatcaatcctcaatactaccacttcatcatcacgaatatagtctaacacacatagaattcgccaattgagcctccgaatacttaataatgcctatataagttaggtttctgaatttgatgccaagaggccacaagcgttctaacaccagcgccaaaagctgattatgaaaagataatataaatattataatatttaaagagtatttcgaaattaatattcacttattcttctaaatatcgacggctttttttcatattttgacagaataatttactggtagtcggttctgaacgtatatgatcatcacgcaacgaattgctagaatacggaaaagctgatatccatcaaccgaataatggcacttaaaattcataggattaacattattcgctttattctaacggttagctaaaggacggctccaaaataagaaaagaaatatcggtatacataatatgtactgttttattgtagtactattgcgattatctcaaaagcatgacgggtgtaatccataatttgttcagaaattccttttctactgtatttagacttaatgatttttaaagaagcaaaaatctataactttaatttatctaactagttacattgtgaacagataagaaaaacgggttttttactttttattaaagcggagaaacaatctatgcgaaagcaattaagacaaaaaaaagtaaagcttcgatggaaccgaatcatatcctttgcttctgcctgcatattgatattgagtatgttaattggcttgacaattagtgtgttaaacgacaccacgagaaatacttcagcggcgtctaagccaagcgacaataatcctgtgtctgatactcagacaaaaatcaaaaacaatttgactcgctatttggcttcggtgacctctaatggaaacgtggcagttgatttctacaatttaagtccggttagcggcagtcaagcggcccaagaaagcaacgccgctgtgtacaccgaaggcagccttgctgtttcatttaacgggacccaacgaatgattgcagcttcgacttataaattatatattaccgcgtggctgtttcatgaaatcgaagttggagcgattacttggaccgataatgatgaagacggtttccagcgtatgattattaactcggataatgactactcagaggccattcttgatcaatatggcgctaaagtcttgaataagtactatgcaacgctcggaacaggatatgtttttaagagtagcggggcgactaccaccagcaatgatttaatgacaatattgaaggcaattcaaaaaggactggtccatttgataatgcatcccttcgtaaaaagctgttgaccgcaatggaaaatcaagtttatcgagacggtattccggctgctgccgaacaagtagctagcggatcaacagtgcaggacaaggttgggtggattggcagtactgataatgatgctggtattgtgacaacacctaagggcgatcgttatcttttggtgattatgaccgataatggaaactatcaagacttttcacaaatcgaaaaaatcgcctccaaaattcaaaccatagtgtatggtaaacagtaatgtttttacatgtgctcttaatgcatgatttcctgtgaacttgtgctgagaaattgtctttttcttttgcgaggccgcggcctataaacagtccgtttattgatactgtccttgtcttgcttctatcattatgtcttgatcattaacgtcaacattgccagcaaaattgggagtgactaaggaataggagccgatacggtttttgaaaatatagtacccgccagagaaccttgcatcatttgaggcaaaatcaagctctgtatttacttgaacggaacgaattggtgggtcattcttgaaatgaacatccggtgcagaaaagatacgcacagttttcattgggatgacttttttagtaaatgacccagttgctgtacggattacaccattatgagactcgttccaactatataccgagaatcttgacagattagcgtctagagcgatgtgcgaaggaacgttgacgccattgaaatgaaagtttggcggcgtcccaatggcatgaagatcaattccttgagtcgttttctgagtgttttcgttattggcctgtgattctgattccacactagacactatcgcagcttgcggttttgaaatagaatctgctcgtgctttagatgcatctttggctttttttttagacgctgctgctagtttagctttagacgaatgttcagattcagttttcgtttggtgtttggaacttgtctcttgtttgggactattatccgcggagttactttgacaccccacaaggccgagcacaaccaacatagcagaacaaatccccaatgttcttttcattttgatacctccttatatggctaggtattatcacatttcaatactcataaatccttataaaggtacacttgattcttcaaacatcacttaaagctatcacgcaaaatcaactcattacttgtaattagtttgacaggtttggagatagtgccgtcaataataccttgaagcaacatgacacttgttgctcccatttgtcgggttgctaagcggattgtgctcaggcttggcgttatatagtggctaacgtctagatcaccaaatccaataataccaacacgctctggtatagcaatattgttttcttgcagtgctttaatggcaccaatcgccatcgtgtcactttcaacaaagaaggccgtgggaagttcatcgcccaacttcgatattgcgtctttcatttgcttatagccactttcaatgctgaaatcgccagcgaggacggtggagtcagcgctatttttgtgtcttgccataaaattcttaaaggcgacggtccgcggatcttctagtccgcggtcttttgttgaagagccggctagtagtccaatatgagtgtgtccatgtgcaagaaaataggtcaaaatttcttcaactgaatttgtgtagtccgcagtcacgcaactaataccgtgtttaagtgtgtcttgattaataatgacaagcggtttatctagttcggataattcttgtaaatcctcttctgaaaatcgaccaattgcaatgacaccgatgatctttgaagattcgggcagttcttcattaaaataatggcggctaacttgataaccacgactttttagggctaattcaacaccccaacgaatggcacgaaaatagagatcggtcatgccgacttcctttgtgtaccaatctgtaatagcaactgtcccaacggtatcttcaggtttaggtggctgaattttataattcatggattgcgcagttgccataatgcgctcacgcgtttcagggctgacagacaaagttttatcaccgctcaaaacacgcgaaacagtcgcacctgaaacaccagcagcttttgcgatttctctgattgtcgccaaaaagcacacacctctctttactgacgctatgaaaatttactaaatatgtagcgagcaaaccacatacgaccctccaataaaagtataccgtaagaaagaagaattgtcctattttactcatgcagacactgacgggaaaccaaatagtctagttgacctaccagaaaagatattttccgtgaattcacacgttgcatggaaaaaatacgaagcaagctttttgtttacgaaacatgttgatgtttagtaaacgatggtgtataaatatacttgttgaaagcgcattcaattcttcgtgttctgcgcttgaaaataagacaaatgttttcacttggggtttaaaaggaggatgaatcagatggcggcggatcttacgatgatccaaatcatattgctgacactattagctgcagcttgtggcatcgatccatatatttcaggacttcagcttagcaaaccagtcattgccgggtttttggctggtattatcatgggcgacatccagacaggtttagtggtgggatcaacacttcaattgatggttcttggtgtgggaacatttggcggagcatcaattccagactttgcgacaggcgccattatcggcactgcgctcggtgtcgtgagcggtaaaggaatccagtttgcaattggtatttcggtgccagtcggtttactgatggtacaacttgatgtgtttgcccgattttgtaatgtgtatttcttacatcgtgttgataaacatatccagaacaaggaattttcaaaaataaatcgagaagcatggctaagccttcttcctattggcttgtcgcgtgcgttaccagttggcatctcattgatctttggaaacagtgttgttaatgccgttttaaaatatgcacctgattggttaatgggtggcttgaagctcgctggagcagtcttacctgttgtcgggatcgcgattttgctgcattatctgcccgttggtaagtttgtggcattcttaattgctgggtacctgcttgctgcgtatctcaagataccaatgatggggattgctttattcggacttgtttgcgcattaattcattttaagcaacttaaggaaaaacaagccatgatgaagaatgtgaccaaaactgccatcgtcgccgctgaagaaataaccgagggggaaatcgaagatgatgaactctagtgagattagccatttcaaacatcagactctgacaaaagaggacttacgccgtgtcaatcttcgctatatgtttggcggacagttggggtggaattatgagcgaatgatgaatgttgcatacgttcatgcaatcctccccgccatgataaaaatgtacggagatgattctgatgttctgcgggatatgttacagatggagatgcaattctataatacgagtccgtttctgtcagccatcattactggaatggatctttcgctccaaaatgagagtggtacgaagtcaaaagaagcagttgccgcgattaaaactggtctcatggggcccttcgctgctgtcggtgattctctttttggggcagttattccaaccattttaggttccttagccgcctacatgggtatgaagggaaatcctataggcgtcatcatctggctattgtgtgcaatcgtcattttgggcctgagatatttcgaattacctattgcctatcgtgaaggtaagaaactcgttagcaatgttggtaatttgttaaataacttgactgatgctgctacgcttttaggcgtttttgtgattggcggtcttattccgacagttgtaaatgtcattgtgccgtttaaactaacgatcggcaagaaatcactagcgattcaggcagatatgcttgatcaaattttacctgcgcttgttccaattgcattagtagcactagcttattggctacttggtcgtaaaaaaatgaattcgactcgtgtaatttgggttttcttgattgggtccattgtcttatatagtttgaagctattagccgttgggtaaccagacgaaggaggtgttgaaaatatggcacaagtaaaacagccaaatgttatcctaatggtcgttgatcaaatgcgagcagatgcgctgtcttttaacgatgtgcatcattttgctagcaccccaacgttagatatgatggcgagtgaaggctataatttcgaaaatgcctattcgccagtaccaagttgtgttcctgcacgagcagcgttgttgacgggtttagatcaacaaaatagtggccgtgtggggtatgaagacgaggtgccgtggaatttcccaaacacattaccccagacttttcgtgacatgggttatcagaccgaaagcattgggaaaatgcacgttttcccttcacggaggcggctaggatatgatcatgtccttctccatgatggctatcttcacgcggatcgtaagtatgacaaaccgtatggaacacagtttgagtatgcggatgattatctggagtttttgaaatcaaagttgggtaacgatgcagacattattgatgatggtgtcaattgcaattcatgggaagcaagaccgtggccatatgcagaaaatctccacccgacaaattgggtagttagtgaatcaattaagtttctacaaaagcgtgatccaaccgttccatttttcttgaagatgtcttttgaaaaaccacacgcgccgcttgatccacccaagtattattttgatatgtacatggatcggctcccagaaaagcttgatctacacattggtaactgggaatctctttctgataaagttccaagtatttatgcgcttcgtggaaaactgaaagcagatgatgaacgtcggatggttgctgcttaccttggattggtgacacatattgatcaccaaatcagccgatttctgacggccttaaaagagttccggcacgacaaggacaccatcatctggtttgtttccgatcatggagatcagttaggagaacactatctctttcgaaaggcctatccatatcaaggcagcattcacataccgtcgttcatttatgatccaggcaacctaattgctgcgcacgaacacaagataaaacagcttgtaaagattcaagatatatttccttcacttgctgatctggctttaggaaagaaggtaaaaactgacggtaggagcgttcgacaactactttttggcgattatgaaggttggcgaaccgaattccacggtgaacatagcttaggagaagattctagtcaatatattctaactgacaaatggaaatttatctggttctctgttcgtgatgagtaccaattgtttgacatggaaaaagatcctcatgaaatgcaaaacttgatcaatgacagtaaatatagtccggtaattagggaactcaaacaaaaaatgattggttatctgttcaatcgtgaagaacgctttgttaaagacggcagtctaaaaccggttccggttgaaaacattaaatcaacgctaaacagttcatcagcaggaaaggatgggtttaatgagatttaagaaaatcaaaggcggctcattccaaatgggaaccaatgatcgtattggctttggtgaagattatgaagggccaacgacgattgttcatgtaccaagcttttctatggctgacacacctgtgacaaacgcagacttcgatgactttattgccgcaactgcttatcaaacagttgccgaacgattaggaagttcttttgtttttgaattactgataccggaggaagaacgcgtaacataccagcatgttgctggtgcaccctggtggcttttggtgccaggggcagattggcaacatccttacggggcagaaagttcaaatatagatctcgacaatcatccagtcgttcatgttgcgcttgaggatgcactcgcttattgtcagtggtcacatagtcaactgcccacagaagctcagtgggaatatgcggctggcgcaggaacagcgacaacttatccgtggggagaatcgctggttgatgaacatggttttcatgcgaatacttggcaaggagattttccaaacgataatacagcggaagatggatttgttggtactgccccagttaagtcgtatgagcccaatagcaatggtctatatcagatgatcggtaatgtttgggagtggtgtcgaaatccacgatatacattattagatgatttcaacgcggagcaatttaaactgggaaaagttcctgcagcaggtgagtatgctatccgcgggggttctttcctgtgccattgttcatactgcaatcgatatcggactgccgccaggaacggtgtcgatttacagtcaaccagtagtcatttgagttttcgttgcattaaagaagttagcagttgatcatgaaagtgattttatatgtggtcgtcattttgttggccaacacgattggcgctatatctggcatgggcggtggcgttatcattaagcctgctcttcaaattttcaattgggattcagttttgacaatcaacttctattcaagtgttgcagtctttacgatggcagttagttcaacgtggaagcaaataaaggcgaagaacgccatcaataaaacatgtgtggttgggttaagcttgggctccattctaggcggtattgctggcgatataagttttgggtggttctatagccgagttggtgatgatattagtgttgctgcgcagatgctactggtcatcgtctcgttaatcgtttcattgattctgtccagtggtcgtcttcagtcacgacatttgacaggaatgccaatgatgattggggcaggattcggattaggttggctggcaacagtactagggataggaggcgggccgatcaatattgcttgttttctgttcttgtttggatttggcatacggcaggcgacaatctattcaattgtgaccattttctttagtcaggctgcaaagattgctcaagcattattttcaggtagcgtactcatgattgatccgtttttagttgtagctatcatggttgcggctctatttgggggatggctgggtgcagtcattagtaaccacattactgaaaagtggattctaatgttgtataacttggttatcgtttttgtcctgttgcttgatattgcaaatctgattagttatctcgtgaagtgaggtggtggtttcatgcgaaaaagtgtttcaatcttaatcaaaccggcaagttcgttatgcaacttgagatgcaaatactgtttttatgctgacgtcagttctttgcggaaggttaaatcctttggacgcatgaaattagaaaccgtcgattcgctcattgaaaatgttttcgttgatttgaatgacggagatcaattgacaattgcgtttcaaggcggggaaccgacacttgcggggttgagatattatcaatattttcttgctgagataaagaagcagacaaagaaggtggctgttcattatgctattcagacaaacggcatggtcattaatgatgcttggtgtaacttactaaaagaacacaactttttggttggtttatcaattgatggcacgccgatttatcatgatctgaatagagtggatgttcgaggtcgcggcaccttctatcgggttatgcagacaaagaagctatttgatcaatatgatattgagtacaacgtgctgtgcgtgttgacaaacccattagctaaacatgccaaaaaggtttttgacttcttccaacaaaatcatgttaagtatgttcagtttattccctgtttagatgaaatgaatgcaaccagtcgtagtagctatgcgttgacaccagagcgatttgcgtcattctatcaaacgtattttcgcctttggttcgatcaattgcaaaaaggcagctatcaaagcgttaagctctttgatgatgtcatcaatcaattcgtgcacggacgcagaactgcttgtggattggacggtcaatgtcaggttcagtatgttatcgaggctgacggtagtgtctatccatgcgattttttcgcggttgatcagtatcggcttggctatattcaagataagacgctgagagaacttttttctcagccgaatacattgaactttttacagatggaacgaaaattgccaatttattgtgagaactgtccgtttaagctgtactgttgtggaggatgtcgacgaatgaaggacgcgatgtatgttaatcatgaaggaagcttttgcggttatcagcagttactttcagtgttgcttcaggagaaagaaacaattctgaaagaaatatcatcggcacattttgtcaattgatttcattgacctgaaagttctttgattaactaatttctgcaaagatcaaaattgtccaacaaacacccgcttatatttgagcactaccccaaagttggaacacaactttggggctttttctgtggagtcagtctttttagcctttgtagacgttgaaaatagaggcagacgtcgtcaaacccttcatgtactttcgaaaaaagtggtcgatgatggctaaaaaccagtctttgaaaaagttattaagaattaaattttcaaatataataaaacaacgttgtatcattcaatacaacgttgtataatctaaaacgatatgaaagcgcatacaaggaggattcaaactaatgactaacaaagttctagaaccaacgatcatcagtactgatccaggaattgatgatgcggttgccattgcgattgcacttggcgatccggtgatggatgttcagctaatttgccctattgcgggaaatgtcagcgtcgaaaaaacaacgctcaatacacgtttgttactgacttttctcggccaatcaacaagaattgttcaaggtagtcgcaagcctttgttgcggccactgaaagacgcaagtggcgttcacggtaaaacggggatggatggatacccatttccgaaagccaaggtgccagttgacacaatgacaccagcagcggttgcaatgcacgaaactgttgtagcaaatcaacaaccagtcacattgatcggtatagggccattaaccgatattgcactttttattcatcaataccctgaagatctgaagaaaataaagcaattggttttgatgggaggtgcgcttgggagaggcaatctaggtgtgctgtctgagtttaattttggaactgatccagaagcagcaaaaatagtttttaatagcggactgcctattcgcgttgccccaatggaagtggggagacaagcaaagattttgcctgatacttccgagaaaatcaaacacataggcaaagttggcgacatgttttacgcactattctcaaagtatcgcgggggaagcttcaaaactggtctcaatatgtatgacgcacttgctatggcgatgattcttgacccattctgctttactgaagtagaaacgcacgttgcaattgaaactcgtggagaactgaccgcaggagcatccttaattgatttgaagggttatcttggaaaatcagctaatgcgagtgttgctgttgatgtagattcaaagagatttgaaagttggtttgttgatgcgattagtaggactgctaatctataggaggagacgtaatggacgctattcttgtctcagctgtcggtctagttgccgtagctatcttgatttacatgctgctaaagaaaaacgacatcaaaatgacgctgttgagtttgggcattatcttaatgtatattgccattctccttggtaacaagataaaagtttctgctccaactgggactgcttggcttgatccattccaagcagttgttgatcaattttctaacacgcttgtcggtccaggttttgttattttgattctaggcggatacagtgcttatatgagccatatcggagctaatcaggtaacggttcatgcgctaacaaagcctattgctaaaatacactctgtctatattctgatacccattgtgtttctgatcggtaatttactatcactagtgatacccagtgcttccaatttagcaattatcttgcttgcaacgttgtaccctgttttaagagcagcagggatgagtcgactatcagcagctgctgtcatcgggacttcagcgaccattgtccctacaccattaggctcagataatgtggcgattgcagctcaacttcatatgactgttacggattatgtttttagaagtcatgcgttggtatcaattccgacaattctggcgatagcggtagttcattatctgtggcagaagcatgaagataagcggcatccagacgaattgacgtattccgaagagctgactcagaataacgatgggaaagcctctagtacagaaagtggcaacagtcatcgtggctttttagctttcatctatggcttgttaccgctgttgccgatcgtcctactgttaataattttctttcttaatatcgctcttggcacaaagcttaatattagcgtccagatggttaccttgattagcttcgtggtggcagtgttcgttgaattgctgacaaaacgaaaagtacaagatgtccttaaagaaaccaattcattctttactggtatgggcgacgtgatgagtattgtggcgctgttggttgctgctcagacatttgtacaggggcttacgtcattaggaattatcggattaattcaggattccatggaaaatatgagtgggtcggggtttgtattgccgattattatggttctgtttactgcagtcattgttttgctgagtggtagcggaacagcattagtatttgccatgattccacttattattccgttgtcaaaggctgccggaattgatccagtcgcactatcaataccaatgcaacttgctgggaatttattacgtgccgtttctccagttgcggcagttgtcttaattgttgcagggacaacaaaactatcacccatccaaatcgttaagcgcacctctgttccgatgattttcggagttgttatgatgttagtcatgtcactgatgctcttttgattaagaggtgaaaagatgattgaaatacagcgcattcctaaacggctggctattgctgaggatttaccgcgtctcgaagaattgctttgcaatgctaaacaacagatggcaaaagacggtgtcacgcaatggactagcgattatcccaatcgtgaacatcttcttcaggatattacaaaacagcaactttgggtatttggggatgctattaaagccatggtagttcttgaaaagcaattaacattgtggcatgttaaaaggctcgttgttgacgctcgcttttctggagacggtattgccagtagtatcttagaaactatcaagcagtccatgatggaggccaatgtaaccgaagttcatatttgcacgaatcacactaatctgcgcatgattcatttgatacaacaacaaagcttttctccttttcgtcgataccatgctcaggatagagagagtttgggtgagttcatcgaatttagttacagtaggtttgtggactcgcttccatggtaaaataaagcgacctacaaattagttttaagatggagaaacgcaatgcatcgttcaccaaagtacgttcaagtctataatcaaatcttgaagatgatcaagcaagggcaattggcaccgggatcaaagctgccatcggaagaagttttaacgacggaatttgaagtgagccgggtcaccttacgaacggcactgtctttgcttaaggaggatgggttcattcggagtatccatggacagggacattttgtcgaggctggagaaagccaaaagggaagcggtattgagacgcttggtgacccgatgcttaaaagtcttgtattgcccattgaaaaacgagaaacctattttcatgagaatcaaccaagtgaatttactgatcggttgtttgatagtcaaaatgcaccctatgacacattgaacatatggtaccaaaataaaagtggcaatataggtaatacacttagtattttattgccgaaaacaattgaactgtttggcgttaatatgaacagcagtcgcgatattgtgaccttcttagaggaaaccatttatcaaaaggcttcgagttcaacggttttaatcacgttatctgatcgccaacaaaaaacttttcgacgtacatttagcgatgaaagcccgcttattctcatgacggaagatgtttttggcttaaatggcgagcggcttctacaaaataagcattatattcctgctaatttgtacagagcaaatgtggttcgttaccagaatgatttgcagaatcagattagtcctgtagattaaaccagcgtgttatctagcttgcagatgtatcaagattttaaatagctataccaaaaatggttctgaaattccttgaattcaaggaggtccagaaccatttttgatgaattctattatccaattttacgacataagaagtttgagctactttcttagagggagcttatctaagaaatcgtggatacaactgtcccagtagttccagtcgtggtgtccgggcgatttataaaaattatggcggatggacggcagggagtcggcagtatcagcgaacttctgattaaattgtaatattggatcttctgtaccacagtattgatagagctcaggaagctcttgatcttgttgatgcgttaacaaccaagacagatcgttttttgttttagctagcgttgtgccatgcccccaaacttgatcgtaaacatctttcagataatgttcacttccggttaaatgcaacgctgtcaataatcctttgtcatgatcgttaaaaaaggcagtaggatctaacactcctgagaaactaccagcaacttcaaacatttctggtttgtttagagcccacttgaaggctccaaatccacccatagacatccctgccacaaaatgatcttttcgatcgtgcgaaatggaaattagcttatttgtgatactcggtaattcttctgttagaaaagtccaataatcatcaccatgtttcatatttgtgtaaaagctgtttgcaaacccagcactaatgacgaccaactgatagttacggacgtactgctcgatattcgtacggcgaacccactttgtgtaatcatcacccataccgtggagaaggtagagaacctgatattgatcacggctaaaattctcagttacttcagggatgatagcgtacaaggaagtagaatgtcgtaaagctgttgacttaaaatctagatgtagtaatgacatgatgtgcctcttatttcagaatattgagagatccaagaacaacggccagtgcaataatgattagcatggcacgtgtgtagttgtgatcaactttttcaaggtagaaatagacaccagtcacaacgagcaatggcaaaaggcctggaacaatagcattcagcacgtcattttggatgctaagcgttttgacgcccgtgacgattttaatcggtgtgctgactttgacgtaagaggatgcaaggccacccatcatgaataaaccgagaacacttgcgccagtaatgagttgtttcacagccccgccggacagaatcttttcaacggaggcttcaccagatttatagccaaggtggaagagaaaataactttccatcaaggttactaccatgaaaatcatccaaggcgctataccggctatgccattgcctttttttgcaagtggaatgaacagactaagaataatcggcaaccacatcccccaatcaatggtgtcaccaatgccagcgacggctcccattaatccggtcttggtacccacaattgcttcttcaggaatatcttgcccttgggcccgcttttcttccatggcgatggtcatccccggaatgagtgatccccaaacggcgttcgtattgaagaattgtgtttgccgttttaaggcatcttttaaatcatcagaatttttgtaaacttttcgcaagattggcgaaagggcgagcccaaacgaaaccccttgcatacgctcaaatgaatgatttgtctctgccaacagccaccacatgaaccatgatttagtgatgtcacggcgggtgatttgtttcgtatcagttgaagattttgttgatgttgtcatgacttattcctccctcgatgtttggtgattcttagcagtgaacgtaatatgcaggtatgcgaagaaaaggcctgctaaggcaatagccaaagttggaatttgactatattgttctaaaaagaaaccagctagaaaatatggtaatagactacgtttgccgatttgctgaacgatgatggcaaaaccaacagcaggcaacatggaacccgctaaacttaagccattaagcgctgccttaggaatcatattgatgattggaccaacgtgggcaaccccaaaataaaggacaagtgcaattggaactgcgtataagacaagcttgtaaagtgttggatacagaacagatgttataaacatgccacgataattacccttgtcgatttcgcgatcagttttgtgtgctaggaacccgttaataatgaattcaacgtttgttaattggaccccaagcaatccgattgggacagctaaggcgacagcagcacccgtgttgactttagcaacaacagcaactgagcacgcaataagtgctgctaatgttggatctgacggcatcgcaccgccgggagctagcagtccgagatacataagttgtaacgcagctcccacaatcatggcagtagggacgtcgtgtagcactaatccaacccaaagggctgctgggagtggcgaaaatagaccaaacacaccgaacgtataaccaaaacggcaacccttgaaccagtagaataaaccaattaggaatgcttgaagcagtgtaatcttacccatggtaaacatcctccttatatctagttcaggctaagttattgaaatgctttttgataatttcgtctaagctgactggcttttcatcaggaactctttggaagaatatgcggacatggttttcttggatagctagaagttcctttgcctcaagttcggatagtgcgacactttgatagactaactttcgatcagcatttgcgccgataccgccaatttgaacttcatcaactgagaatcctgcatcaaaacatttttttagattatcgactagcttgaagagaatgatataacggttatcgcctagatcttggctttttaccatgtcaacgaaatcgttgggagccatcactgaaacatcaatgttagatggagctgccattttgaagacacgactgagatattcgttagttgcaagatattggtcgacaatgacaattttattagctttggtttcattgacccatttggttacgatttgcccgtggactaaacgatcatctacgcgaacgagcttgatattatctttgtatgacataatgaaatcctccattttttaaatgacttattcaacaagtttctgattaacatcaataatgcctttttgtgctgcagaagagaccttttgaagatattcgctataactaagatttgactgttctcgatccaatgctgcttccaaaaccatcggtaaattcatgccggcaaaacagttaaatttaagatcttgcatggcggcaatcacgctgtttgtagggctacccccaaacagatcagtcaacaccaaaacatgatcaccattggtagaatgcgtcttaatctcatgtcgcaatttttgagaaaattcgtcaatgctatcaccaggattcaagacaaaagaagtgatatttttttgcgggccggcaatcacctcagcactattcaagatgccgtgtgctaaatcgccatgggacgctaagatgatataaatcatagtcgttcgtcctccttacatttaaataaattaagtgtggttctaagcaagcgagggaaaaatagttgaatctgattcatacgtttacaaaccagtcgctcattatgaaccgcttacacttttatacaagcaagaaacgtgccaacatgtgtcgacgccgagaaaacttttcttttggcatgaatgtagcagatgcatgctgccaagcagaacaattgtgtattagttaacaaatgctacaatgtgttcgacagatactttggactgaactaaatgtgtcgaggggagattaacatgagttttgaagctgtaaatagggaattgcgtgaagaaacacaagctattagcgacttaagcgatattaacaaaatcacaactgaccgcattgctgaaaatcttcatttgagccgcacgacagtcagtcagtacttgaacgacattttaaaaaagggcgatgccattcaaatcaagtcacggccaaccaacttcatcaatcggcagattttttctgaacgttttttctcgccgaaacaaacgatatatccatcagtagcctcactaataaaagagcaggttcgccagaaaaatgtttttaagactttcattggcaatcaagaaagtatgaaggaaatcattgagcggctcatcacagcggaaaattacccgccaaacgggctacctgtcatgctttcaggcaacacaggtgttgggaaaagctatcttgccaagctcacctatcagtattgcgttcaggaaggtttgttgaagaaagatgcaccattcgttgtcttaaattgtgcacagtattatcacaacccagagttgctctcaagcaacttatttggatatgcgaagggcagttttacaggagctacggcagatttcaaaggaatgctggagtcagcaaatggcggcgttttgtttttggatgagtgtcaccgtttaaatccagaaagtcaggaaaaactcttttcgtttatggataccggtaatttcgagcgaatgggagaaaacgcggtgtcgcgatcaagtaaagttcgcttgatctttgccacgactgagaatctgcaagaaaattttttgcagacatttcttcgtcgtgtaccagtcgctgtcacattgcctgatctgaataatcgctctaaggcagaattaaagatgttaattttccaaacattcattgaagaaagccggcgtttgcaacgctacttcagggttgcgccgtggatcatcaatcacctgttcaatttgaagtataagaataatattggggaacttaaaacaacgattaaactgatttgtgcgcatgcttatagccaagatcaaatgaatagtgacattgaaatttcgtcagataatattggtaatagtttgctacaacgattaacggccgtgaataaccaagaagaaatatgtagtgaagtcgttaactttacaccggaaagtcgcctgaccgacttcgttgatacgacgatcagtgagaattctagagtcaatgatttgatgacgcatctttgtgacgtggagggggaatttcaaaatgataagctgacggcagccatggtgattgaaatcatttctcgtgaatctagagcgttaatggatgaaatggttcatcgagataagcgtgatcacaacgaatctcttaagtacttaatcaatattattcaacagttgtttgattacttaggaagctcgctttttgtaaaaatcaaaggtaatgcagtgattgcctttgccagcttcatttatcttaagcaagaggttgatctggccttaacggtgaaagctgagaaaagtgtccataatcttttggaacttgcgaaacaaaatgcgacggtcgagtatcaagttttaaagtcttttcttgaattgatcaaaacaaagctggattttcgaatgggtgaagttgataaacttcttctcctaggctatctcattagtcttaacctcaattacaaaaccagcaacaagcatgcgattattctggcccatgggtactcaacagctagtagtattgcagacgttgccaatcagtttttaaacaagaaaatttttgactcatatgatatgccattgaatgtttcgatccagcaagtgaatgattatattcaacagtatattcacaaaaatgattgccataagggtctcattattttggtagatatggggtcattgatggtattgcctgattcgttgaaggctaatattaacggaccattgctggttattaacaatgtatctacgcagctcgctctttttgtcggagaaagtatagagaagaatatcgcatttaatgaaattggtaagttgatgactgataagcttgctccagaatatagtttaatctatccggtcattaagaagagtccaatgattattacgacatgtcatactggaattggttccgcaaaacaaattcaaagtttgcttgagcatagtattccaaccagtcttcattacaaaattgaagctgtggacttggaatatctcaaaaaatatggcgatagcaactctgtttttgaacagtatgatgttaaggccattgttggtacgagtgatccgcacattaaaagggttccctatatagcacttgagaatctcatcgccggagacggtacgtctgtggttaagacactatttccagacgtcaaagacatggcacttttgaaacgtatcaataattatcttgtcgaaaatctttcagtggaacggcttctgtctgctgttacaatcctagatgctaccaaggtgatcagttcggttagcgatatgatgacagagcttgaagagaatacaggaattcgtctgacaaataatcaacgtgtgacgctttatgttcatgtaagcgctatgattgaacgactgatcagaaatgaaccaccactggtttataaggttgttagcagcgaagaaagaaagcaaggatgtactaaaatcaaacgggctttgagaaatattgaaagctcatatgggatcaaagtcgatcaaaatgagttgaactatctctatgacattgtgtttcagctatagattatctttggatggacaacacaaagggaaagacaatcaaaatggatcaatctattagactcaatcaacggcaaatcaataagttggtgctaacgcaaggcatgcgacagtcaattcagatgttgcaattagacgccgttgatttagatgcatatctcaaagacgttgctgaatcgaacccttttattgaagtacgctctcattttgagcgggcagaagattcattatctggcgcaacatttgaagaaatgtcggctgggagcagtaccgaaaatctttttgatcatttattaatgcaagttcaactttcactagctgggaatcctttgcgccaaatcgtcgtttatttaatcaatcaactaaataacaatggctatctgattctggaggatagacagatcgtggatgagatcggtatttctcccgaaaaattgaccgaagctatgcggttactgcagggactagatccccccggtgttggcgcccgtaatcttcaagagtgtctatcactgcaggcccatcgtgatactggcataccaaagggagttattgccatacttgatcaggattttgaactgctagtttcgcatgatatgacacgcatttgcgaaaagaacaatttgtcgacgaccgaactacacaatgcgcttgacttcataaaatctctttcggctgctcctgggaaagtatttgagcaaccgcaaccaatttcgtatattattccagatgcaaggctgagtgttactaatgatggtcaacttaaactatggctgacaaagtggggtcgccctgagctggtatttgcagaaaaaacttatcaagacctgaaaaaatcagcagattcagcgacacaacagtaccttaaagaaaagcacgaggagtatttgtccctgcaacacggtctacaacgccgcgaggagactttacttgcgacagttaatcaaattgttgtgaaccaacatgcatttttattacatcaagcggctttggcaccgttacttcttagagatgttgcaaaagcacttcaagtcaacgaatcgactgtgagtcgaacaattaaggggaaacatttacagacagatcttggcatttttgcctttaaggactttttttcgaagcgtacacaggctgtatcaagtagtgcctatcattctgttgatcagttgaaatttacaatgatgcagttgattcagtctgaaaataaaatgtgtccagcaagtgacaaccttttagtcaaatggttgtacgaaaaaggctttaaagttgctcggcgtacggtaaccaagtatcgcaatgagctcgggcttcctgctgcttcagcgcgaaaatcgagatgactgaaataaaaaaatttttcgtgctcatagtcgttaactggactgataattaaaaaatggatttgcaacaaaaagtgcctgccattcgtggaacttgaatgaacgacaggcgctctttgttgcaatttttttgacatcatgattccaattatcagatagtcttcaaaatctgttctggttcaccgacatgtgagataggcatctccataaacacactatgcgacatagttgattgtagaagcggtcaccagaaagtcgtatcacttttagtcttaaacatgatcaaagtatattagaggagttgaatctagtttacgaggacaatctttatgtcctcttcaaaggacaaaattctgtaagcgctttctaagctacctgagataatgatgatggaaggagatgggaccagatgaccaccgatcttgcgcagtcagtgattcatctacttcaagaccaacaaggtttcataacttctaatgagctggccagaaaacttcaagtttcttacaaaacaattcagagggttgtgagccgcatcaatagcgggtatggcagcaacatgattacttctgagaaaggtcgtggatacaagctagactatgaacgatttcttttaagcaaactaagtggaaaatctcctggagatcattccttaccggcggaaagacagaaggcgctgctaaaaaagttgctactcgcagcaccttccaaattgaaagtcggtcagttagccgaagacttcttcgtcagtgaatctgtcattcaaagcgacgtcagctctttggaactatggttgagaaagtatgacttaagtatcacacgggttaacagaacactaagtattcgaggtgacgagaaagacatccgtgatgccttgatggaggtgattctaggtttgagtaaagacacaacgatgaattttgaagcgatgacgcaaggattagctgaacatgatacgacatttgcactcaaacaagtggatgttgttgcccagtttttaaaggctgatctaccttatccttacgatgtgaacttgttttcgcatatctatgtgctgatcagcagaattcgaaaatttgtcaaactgcccattgaagatcaagacatcacaagactgaaagaaaaagtgcataactatccggatctattcagcgtgagtgaaatggtaaagcgcaatttggaaaattatcttggagaatcaatctcggagaatgaagtctattacctatttcagtatttgatttctgcgagatttaccggaacggatttcaaaacaaaagcagggacatccgcttacacgttttctgaagcactcatagagttggtttcttatgatatccagttgcctgacgataaaccagcaatgattgaagaacttgtcccgcatgtcgcgccaatgctgaatcggttagaaaataatattcgtctccccaatgcactactgaaagaaattcaaggcgaatatcccaacgtttaccattcggttcttcatgctactgacatcttagcaaaagagtatggcttacccgagatttctgctgatgaagttggttttctatcactctacattgctaagtacatggagagttctaagaaacctaagaaggcgatcgtcatttgcacaactggcttgggatcatctgaattgatcagcgcgaaaattcgaaaggatcttcctgagctggaaattcttgatgtcatttcaaacctgaacttggaagaatcgttagccaagcaccctgatgttgatattctcattagcaccatcaatcttcctaagcaaaagcagattcctcaggttttagtgagtgctatgtttacggggaaggataaggacaaggttgaagaagcattgagggggcgatgagatgggtaagaagtttgtgattcacattgaatcaatttcgcctaatgcagtgggaacgattgttaataaaacaacaatccttaaaacaatttctgatgcgttatcaaaagtatccggacagagcgctccacaaatacaatcagcgtttatggagcgagaaggcgtaggaaacacagcgctggagtcaggtatcgttattccacatgctgtattagatgggcgccaagtgccggtgctaggcgtcctgagctatcccagcggagtaaaagattggaaggatttgaacggtcaacccgttactcaggttttagcaatattgatgggtaaagacgaaattacagaacaagaagcaaatgacatcaaaagattttttgtcaaattggcatcatcagattttttgcggaagatagctcgaagcaaggattcacaaacagtggttgcagtcatcaaacaacaaatggaggaagaataacatgttagtatctggagatcggcttttacaagtagctaaggaacatcatttcgcaattccagcttttaatgctgggtcaggtcaattatttactgcgaccttggaaaaagctgaggaattgcaggctcctttcattatggcaattcatccgacagagcttgattttctgcgtgacagttttgtcgcgcaggtaattgatgcggcaaatcatacggatctgccaatcgcattgcatttggatcacggggcttcttatgaacaagtaattcatgctattcatcttggctttactagtgtgatgattgatgcctcgttaactgattatgagcacaatgtagctttaacaaagaaggttgtagaagcagctcatgccacaggcgtttcagttgaagctgagctcggcaccattgcagacacaggtaacgatgttgagggccatctaacagacaatgtgaagtacacggatccagaaactgcaaaggaatttgttgaagcgaccggtgtggattcattggctattgctattggcacagcacatggcttgtatccaaaagatgtcaaaccgaaactgaagccggagattgctaaggcagtagctgaagtcgtggatgtgccactggttctgcacggcgcctctgacaatccggatgataagatcgcagaggctattgcgtatggcattaataaaattaatatctcaagcgacattaaaattgcatttgcaaaagacttgcggactgttcttaacgaaaacgatcctgatgaaattcgtgaacctaaagtactcttcccatcgccaatgattgcaactcaaaaagttgttgctcaaaaaatcaagttatttggggatgtggatcgaacaaaactgtattaccaaaatgaaccagttaacgagattccgtataatgttaagaattttcaagttgaacattttagtgcttgatgcagtttaaagaaaaggggggccgatttatggaacagattgatgaagtgcttgatccgagactaatcaagctcaatttaaatgcatcttcaaagcgagatgctattacgcaactatcagagaccttgaaagatgcagattatatcaacgatgtcccctcttttgttaaagatatttatttaagagaaaaagagggcattacgggtattggtgatgggatcgcgattccgcatggtaaaagtgattatgtaaccaaggtaggcgttgctattggtgtctttaacaaaccgattgaatgggaaacattagatgatgaaggtgtgaccgttgtcatattatttgctgtcagcaatgatacggaatctgcttgtaatcagctaaagttactttcactatttgctgcaaggctaggacatgaggacgtcattgaaaagcttaaaaaagcgaccagttcagcagagcttattgcagcttttactgagaaggaaggtttaggacaatgaagatcgttggtatttctgcttgtgcggcaggaatcgcacacacctatattgcaaaagaaaaaattcttcaagccgctaaagatgccggtgatacggttcatgttgagactcagggaacgattggaacagaagacgcgttaacacccgaagagattagtcaggccgatgttgtcttattggcaattgacgtaaaaatctcaggaagagagcgctttgctggcaagaaagtagttgaggttccgactgatgttgctattaagagtcccaaaaagctcattgccaaacttcatgagctgactgggaagtccagttaaacgaggtggatacaaatgaaaaagattcagattaagcagcctgcgcttactgcgatatcatatttgattcctgtcgtggttgcgggtgggttcttacttgctgttgggaatattatgggtggcaaaaacctagaagcagtcaaaggcatggccaacatttgggatgcattttcgaccatgggcggtttaattctcgggatgttgccaattgtcgtttcaacaggggtcgcgttcgcgatcgctgacaagccagggattgcaccgggtttgctggttggtcttatttcaagaattattggcgccggctttcttggcgggttaattggcggttatgtggcaggttgggctgcaatgctcgtgattgcttacgtgaaagtgccgaaatgggcagctggtttaatgccgacattaatcattccatttcttgcctcactgattgctggtctgtttatgttctatgttctgggtggaccaattgcggctggaacagtctggctcacaggctatatgaagacactggatacaagtcagaagttcctttatggcatgatcattggtgttctggcgtctgtggattacggtggtgctattaacaagactgttttcgcatttgttctggcattacaagctgaaggcattaacgaaccgatcaccgttttgattttagcatctatggtcacaccaatgggctacacactagcctacttcttaggaaagttgattcacaaaaatatttatacaccgttggaagttgaaacattaaaaacggctttccccatgggactagtcgagatcacagaaggtagtttaccaatcgttttgaatgatctatggcgaagcgttgttgcaacaggtgttggcggtgcggttggtggcgggttctcgatgttgtggggcgctgactcaaagattccggcaagtggcctgttcgcagtgccaactatgtcacgtccatgggcattcatcgttgccctgatcatcggtagcgttgtcactgcgctcgtctacttgattttaaagaaaccagtttctgctacggacttgcaagaagaaaagaaagaagaggacttgaacctcaaagatcttaagatttcggattgaagttaatgtaaggagatatggcatgacgagtgaggcattcatagggaatgaagctcaaacttctggtgctcagacaatccaatttcttgaaggtaaagctactggtatgaaagccgtgcggatgtataacgaggctggattgaacttattggtggcgccagatagaggaatggatattccagagttgaaagtacacgggacaaacgtatcttttatgtcatccactggtcttgtgaacagcacctattttgttgagcatgggaccacgggatttatgcgaaacttcaatgtcggatttctgacaacgggtggcctcagctatatgggagcttctagcgattcggacctaggtctgcatggaacgattggaaatactcctgctgaaaactttagtcatcaattaacagcaacggaagtaatagtcagcggtgctgttagagaaacagctatgttcggtgtgaatttggtgatgaatcggaagatcgtgattcccaagaatgaaacaaaaatacggattcatgatgtcgtaatcaatgaaggcgttcaccccgcctcattgatgatgctgtatcatatgaattttggttatccattctttagtcctgagtcacaactagtattgaacgcggctaaagtaacggatcgtgatggagatgacgtaaatgattggaatcggtttgatcaaccggcacctgacacgacagaaaaggtctactttcatgatttttctgaatatgcaaacaaagattttcaataccgacttttaagtcccacgaccggattacaggcagtcatcacaattttcccttctttgctatcagtattgaacgagtggaagttaactcagacaaaaaattacgtacttggtttagaaccagctacgaataatgtcaatggtattgaagcggctaagcggtcagggaacttgaaaataattgaaccgaatgaaagggtgacctttgacttagaaattgccttttcaaaactggaggtgtagatctagatgaaacgatctgaaattaatcaaattttgaaaaaatcagaaatttttctcaaggaacatctggtgtttctgccaccgtttgcgcaatggatgccagtaaactggcaaaatcttgataaatcctatcaagaaataacggataatatgcttggctgggacgtaactgattttggctctggagacttcaagcggtacggactagtagcttttactttccgaaatggaaattataaagagtcagaaaaatatcctaaaccatattgtgagaaagtcttgcttttgaatgagggtcaggagctcccatatcattttcataggctaaaggaagaggatactattaatcgaggtggaggaaatctccaaatcactgtttggaattctactgaagatgaggctttggatgaagagaaaccagttcatatcgtaaaggatggacacaagttggttctggatccagggacgattgtgacgcttcatccaggggagagtcttacgactaccactggcatttatcacaaatggaatgtcgaacccaactcaggtgaggtcatggtttgggaggtttcttctactaatgatgacaacattgataatcgctttctgaaagatgtgccacgcgtgccagatattgatgaggacgaaaaaccatatcggcttttgttcggtgattataagaagttgtcataaagatatgcctgaagccgtttgtgcttcaggttttttaacatgaagattggtactgacagattgtgttcacgctttattactaagcagtcccgccatcgcgggctatggaggtcttgaaatgacaaacgaggttgttcttggtattgatttaggtacaagttcagtgaaggtattagccttatttcaaaatggcaaatttcatacacacgctgagccgctgacattgattcatccccaaaacggatacaatgaacagcgcccggaggactgggtcacgcagacttttaaggctattcgaagtaccttgatgaaccacaaaatttcgggggatgctgttaaagccattagcttctcaggacagatgcatgggttggttgctctaggaaaagatcagcaagttctgaggaatgctattttgtggaatgatacacgctcggccgcggaggttcaagaaattcaaagtggcatggggcaagcctatattgatatcacaggcaatcgtgcagttgaaggctatgtccttcctaaactgttgtggttgcaaaaacatgaaccgatgatttggaatcaaatcgacaaagtgctgctgcccaaagattatctccgattaagaatgacaggaagtcttggtactgattattcggatgcaacaggcacaggctatctggatattggtagtggaaaatggagccgggcagttcttgagcattttggaatatcgcttgattggatgccgagattgatggaagcaggcgagattgtaggcgggttaacccaagccgcggctgatgctagtggactgttgactgacacgctggttgcagttggtggcgctgataatgcgatgggtgcaattggtgctggtgtggtagaagaagaccagttgatgtcaagtattggcacctctggcgtcatgcttcatccagagaagaagttgcgtttaaagtataatggcagtcttcaactggaaagacatgcgattaagtcacgtttttattcgatgggggtcacattagcagcggggaattcgttgagctggttccgtgatacttttagtaggggtaagtcgtttgaagacatcgctcatgatgctgccacatcgtcaattggcgctcacggcgttttgtttgcgccatatttgtcaggagagagaacgccatattttgatccgcatgttcgcggtggttttatgggtatttctaatgacactagttttaatgattttgctagggctgttttagaaggaattgtcttttcgcttaacgatgttcttaatctatatagacaatttgaggtgctgccaagtgagatcattgcgattggtggtggtgcaaaaaatacattttgggcacaaatgcaagccgatgtttttgatttgccactcaaagtgccagtcgttgacgaaggtccaggttatggggcagcaatcattgcttctgtggccggcaattggttttcagatgttgattcggccattaacgagttggtgaaatatgacgtcaagtacacacctattgctggtaaccgtgacgcctacgaggatgtttataaagagtatcgccagttttatcgccgacttgcataaaatttgtgagttatggaagacgcctgaattgattgggcgttttttgatagttttaaaaacttgttgatgtttataacagacacaatctgtcgtgtcacacccgtgtgacaaaatcacaattaagtttgaaagcggaatcatttagtatagagactgtaagatagaaaagaggagcaaacattatggcaatgttcacaaaagataatatggtcatggatctccaaggaagtactcaaaaagaaattctggaagacctggctaaaaaggcttatgaaattggcgcagttaaagatgtcgccacattggtctcagattatttggagcgagaagcagaatcaacaaccgggtttggcaatggcgttgcgattccacattcaaaggcagagaacaacgtcacagcaaccatcatctttgggagaagcaaacagccaattgaatggcaatcacttgatggacaacccgctaatacatttattagtttgattgttccagcagccgaagccggtgttcatttgcaattgttagcaaaactcagtcgtcagttagttcatcccgaatttgtcgatgtgttaaagaatggcagtcaggatgaagtttatgaattgattgcaaagacgatccaataatcactgcataaaacaatgtcaacaaaggaggagaacatgatggctgacttgaagattgttggcgtaacaaactgtcctgctgggatagcacacacgtatatggtggccgaagcaattgagcaaaaagctaagtccttaggatatgaagttcatgtcgaaacgcaaggggcaaatggcgttgaaaacaagctaacagatgctgatattgcggctgctgattatgttattttggcattaggtaaaggcatgagtgctgaagacaaagcacgattcaatggtaaacaggtcattgaattgccagtttctgaagcccttaaaaagattaatgttatttttgataatttacatgatgaagcacatttgtacacggcctctaaagtccagttaggtgatcgtaagcaaacagatggcattatgagtcatttgatggctggtgtctctgcagcattaccgtttgttatcggtggtggcttgttgatggccttgggtagcttgatggttcaatttggagctgcgaatgttgctccgaaggccggtcaaatggcctcactcgcatgggtgttgaatactgttggtggattaggctttacaatgatgattccgatcatgggcgcctatattgcttattcaataggtgataaaccagctttagcaccggccttcttagtaacgtatctagccaataccccagatattttaggaacacagggaggcgctggttttctcggtgcgattgttatcggcttgagtataggttactttgttaaggcatttaggaaagttaggttaggcaagacgttccagtcgacattgggctttctcattattccgttcgtaacgcttttactttttggattagtgacgtactaccttttgggaccggcaatggcttggttaatggcagcattactgggtttcttgagaagcattccaccagaaatgaagattgctggaggattcttagtaggggcgatgctggcctttgatatgggtggcccaatcaacaagaccgcttggttctttggattttcactgctcagttcccatgtttatacatggtatgggattgctggcgttgtcactgtattaccgccaatggcagctgcgattgcgacatggattaaacctggtttgttcaccaagcaagaacgtgagtcaagttggcctgcaatgttagtcggaatgacagttgcaactgaaccagcgattccttacgcgttagccgcaccagtgccaatgattactgcgaatacattggccggtgggattgccggcgcaatttcgatgggacttggggttgaacgtttggcaccgggacttggtgtctttgatccattgattggcttgtctcggccggcatgggcatactacatcgctttagcagttggtttagtcttaaatgttttgtttgtcattgttttcaagtcagcgtggctcaaacgacaagaacgcaaaaatggcattattagcttagacaatcagccacagagtacgattgtcggtaatggcactagcgtttcagcagcgccgacgcaaagtgctcagacagcaaagacaatgtctcctgaagccgcaaagaaatagttattaaacacgatgggtgcaggggctgatgtctctgcacctttttagaaagaagcgatgcattttgacaaaatatgattttgatcgggtaattgatcgacatggcacgtttagcacacagtgggattacattgcagatagatttgggcgaaatgatattttgccattttccatttctgacacggattttccagtacctgttgaagttcaggacgcgttgcaaaaacggttcgctcaccctatttacggttatactcggtggaatcacgagacgtataaagacagtatcgttcattggttcgagagagacggccacaccaaggtagattcagactggattgtttatagtccaagtgttgtgtttgcaattgcaacgctgattaggatgaattcacaggttggtgatggcgtggcagtctttacgccaatgtacgatgccttctatggtacgattgaaaagaatgatcgtatactgatgccaattcgcttggaagcggcagatgcaggttatcagattgattgggacagtcttgcaactgtcttggccgaagaacggacgaaagtatttttgctaacaaacccgcacaatcctactggtcgagtcttctcaaaagccgaattgaaaaagctttacgatctttgccaagttaatcatgttttcttgatttcagatgacattcaccgcgacatggtttacctgccacatgcttatgaaccgattacaaatattggcacggaaaatgttgcgctgtgttgttcaggttcgaaaacattcaatacacctggactgattggctcttacgtctttttacctgaaccgactttgcgagcgcagttcttgacagaattgaaacaaaagaatgccttgtcatcggtcagtatctttggcatgttggcacaaattgcggcttataatggatctgaagactatgttcaacaactgactgcttatactaagcataacttagagacggtggccagttacctgcgacaaaacttacccgaagtcaagttttcacttccagatgcgacctatttggcttggattaatgtgagcggattgaatatcagttcagacacattgcaacgtcaattagttgatgtcggacatgtggggattatgcctggaaagacatatggcgatgctaggtatttgagaatgaatattgcctgtccacaagaaaagttattggatggcttgaaacggctaaagaaaggagttaaaggataacatgttacccctcagagaagttaaaatcttacgcctattgtcccagcaagatttctctggggatgaattggcgaagcagttaaatgcatctcggcgaacaatcgtccgagacattgccgcgattaatgatgaaattcaaactaatcgtattggcagaattacaacgcagaataaatatcatctgacaacgctgaatcccggtaaattgaccacactattaaacacaagtcgtgatgaagcaaatgaaatattacttcgactatgtattcggcgaacagtagcaatgggcgatttgacggcggacatgtttctatcgcgtgctcaggttgctgattatcttgttgaactaaacagtgattatcatgatctttttcatatatccagtcgcccaggaactggcgtgacgattaatatgaaacgcttaacacggatcgatatagcggctgactgcatttttgaatttccacaattactggacaaagttgtgccggaagttgaaaacacgcaacgagtcatcacttatttgacagcaaacccttgtccttatcaggagtgggtcattgatagccagtggcgagcgcaggtgatcagcgccttcgtttgcctgccaccgtcaaagacacattcgtccgaagcatcgacaactactttggtgcaccagtttgttcaaggccgtgcagatcttttggcaagtttaatggcaaaacacgaaagtattgtacaaaaattctctcaaacagccgacaagtttcaattggaagcaattggacagaaaacactagagtcattgttcactcactttggtcgtgagtgtgcattcccgcggcctctgagtactttaagcaactttgatattacaagactttctgctcaaaatcctgttgcctttgattttgcacaagcagttacagttgaactattaaagacagataatcgaatgtggatggatgcaaacttcttggctctgtatattgttcaggcaattaatcagcgagaagtaaaaccggttaaaattctttttttggcgcctcgtatgtcgttagcccaaattaattcaacgattattcagcagaagctgcataacattgtactttataccgttcatagtttgacagatgcagaaactgcatataccaaacatcattttgatttagccattgctaatgttcgaaatgacgtcattgaacaatcttcaattaaattttccttgacgttttcggctgttgcctctgatgaagacattgcaacactcgagcagttagtcaatggtcagtattatcatgacaatatcgcagcaatgctcgcaccaaatcattttgtcaacgtaaccagagcagacaagtttttgcctgtgctgagaaaggggctgcaaagtttcaacgatacaggattgctgactgatgcagatcttgtgaaaatcgttgaacgcgaagaagccggcaatcagttaattttaaaccacatttctattccgcatattgtgacatccagcgtttcagattatcgcttatttgcgattaagcccgatcgagcgatcactgttgaaaatcaggaagtctatttaatggttatcgtcctagttggcacttcgcaagcggagaaaaatacaatttttagttatttgtatcaaacgttaagaaagtacacagtcacgaatattagacaggttcaaacctatcagcaagttattgaattgcttaggggcatgatgcagtttgacggctgaaactcgggcaacgtcttatgatcaaccatgtccttttgtcctagataggatctctagtttcaatattgttttaaagcctccaaccacaaagtttggaggctttttgctatgaagatactttcaacaccgtcactgtaacaactgtttgttgatatcttagaaagtgaagtcacgtcttatttgctgtgtgtgatacagcaaacaacattgcatttccggttaaagaagttgtaccggaaaagttgtatttttgtcccggaaaaagatataccaatgtaaccgcttgctggcatgcaataatgaaattgtcaggaggtggggtacttaagtagtctgtgggagaagggggcaatcatgaacgagaaaatcaaacaattgcttgacatcttattgcagcaaaagagctaccttaccgcattacaactatccgaaatgctaggtgtgactgaaaggagcattcgaaactatgtaagaatcttaaatagcagcgagacgcaagaccctttgattgtttcatcaaataaaggctataggattcaacgcgatctgtatactgaaagtatcgagaatcgcctctttgctaaagacgatgctgacctgcttttcaaaattgccttaattctaatgaaccaatcgacattcatcacatttgatgaccttgcagttcagttgaattactctgttgagagtattcgaagtaaggtgcaagctttattctcaaagattcatgatatgaatctacacgttacgttggaatcacgaatctttacaggtattcgaattttaggagaggagaaccaaaaacgactacttctagaacaattaatacctattgaagaaatcgtaaaaggaaatttgactgagtcaacttttaagttattaggaaagctgtcaagcaaagaggctatcaacacagaaatcagcagtattgatacagttttctcacggcaccatacgacgatggacttcattgtctacgcaaagattatttgccatatgatcattgctgtgagccgttacaaagatggccattcgattagcttgtctgaagttggcagcaacaataagagtcatcctgaatttcaactagcttcttctttattagcgatgtctgttttaccaattaacaatgaagcggaaacaatggcgcttacgaattatctaatagccttgccgttgaatatgccaggagcgtttgtgccggaaatgaatcaactgcagcgcaatcggttagaagcttcattaaagagggcagaggaatattatggcattccactgtattctaacgagcgttatcgagctcaaatcatgaatcatatcatgagattacttgatccgttggaagaaagtataccgatttttaatccatactctaaacagacaaaaagagaatacctgtttgcctattcgatcgcatgttttctctatgatgacttggaaagtgattttcgtttacaaatacccgaatcagaaatagcttatctggctattcatattcagcttgttttaactgaagaaacaaaaaatggcatccaaacaaaattagtttttcaaggtaaaaaagccgagggagaattgtttcggtacaagattcagacctattttccccgcatagatattaagactgtcaccccaacaatgattcaggcggaccttcagaagtatcaactgatcattcgctgtggttttcaggaacctgtggctgctaattctaaaattgttgagattagcaaagggatgaatacaagagatatcgcgaagattcaaaattttgttgaaaccgttggcacagcttctttaatccaacagcttgattatcatcatatgaatgaatcttccagtgagtctgcgattgagtatttattgaaaaaatcagggtacttcaaccttttgccatacttccagaagcgcgagtccatgtcaccaacagacattgggcatcttgtggcgatgccgcacccgtttttaaaagggtcagagacgactgccaaggtcattatagggattaatagaacagaaattccgtggggacatcagaaagttagattaattgtgatttatattcctgcatctgaccttaaaacaaacaaaaacttctttaatgacgtgtatgagcacacaagcaatttagcggaagttcacgccttattggaaaccaaaacaaaagaagaatttattaaagtttggaatagaaaaggagattattcaaatgctctataacatggttgatttactgagtgtcgcatataaaaataattttgccgttggatcctataatgttgcgaacagtgagtttgttgaagcaattattcacgcagcagaagctaaaaatgcaccagcaattattcagattcatcctaacgagatcaatttggtgggcgacgatttcactgcctatgtcagacaagcagttgatcgtacgcgcataccaatggccattcatgtggaccatggggcaacactaggggattgcgtacgcggcattcataacggatatacgtcagtcatgattgatgcatcagcaaagtcgtgggatgacaatgtggcacttaccaaacaagtcgttgatgtggcacatagcgtgggtgtttctgttgaagcagagcttggaacaattgggtctaatgaactttcaacagaagggacaggtgtcaacacgattctctataccgatccagaagacgcaaagaagtttgtgagtttgacaggtgttgatactctagctgtcgcaattggtacgcgtcacgggcattatagtcatgtcgaaaagccggaactgcgaattgatttacttgaaaagattcatgaagctgtggatattccactagtcttacatggtggatcagacaataaggatgaggaaatcaaaaaaacataccttcacggtgtagcaaagattaacctttcgacggatatgaaaaccgcattcttcacccaactacgcaaaaatttggatgacaaccctgatgcctatgagccagatcagttgatgccatcagctaggaaggcagcgcaagacattgttgaacacaaaatggacctttttaattctaccggcaaagctgacctgtactagaaataatgatcgaggaatccaagcttggaggtgaacaaaatgcgtattgacgaattaattgatattaagaatattgatactagcattgaaccaatgacgaaagatcaagccattgcacgcatgatcaataaactaaaactgaatggttatgttcaagacgcagatacattcagtaaggctatctatcaacgcgaaaatgagatttcaactgcagttggatatggcgttgcaatcccgcacgctcgaactagcgcggttaaaaaatcaacgatcagtgtctttagagatctctctggtattccgtggggacaggaaaaagttaatttagtgttcatgattgctgctgaagaggacgcttcagacgaacatttgaagatgttgtcaaagatctcgacttttttaatggatgagagttttcgagctaaattgataactgcagcagaccctaatgaaatgtacgaaattcttgttcaagaggatgctaagaaaaatactgaaacagatatttcgcaagcacgagaagctgctggaaagtatcttgtcgggattagtgcttgtatgaccggtattgcacatacgtatatggcggctgaggcactggccaatgaggctaaaaagcgaggcatgcgggtcaaaattcaaaccaatggttctactggtgttgaaaatagacttacctcaaaagatattgaagaagctgacgcgattgtggtggcgcatgatgtcaaagttgataccacagtttttggctcaaagcctttcttggacgtacctgttaagcgtgccatcgaccaaccgagttcagttgttgatcaagctttagagaaagatgcaacaagtccaaaatctgctccgacgcataagaaccttgaagcagctttagggaaagaaaccaaacctgaagaagatttgactgggggcggcaaatttgcccgcgctttttacacacacatcatgagtggtgtgtcctatatgattccatttgttgtcgtcggcggtatctttattgccatttcctttatgtttggtatctacgcttcagatccgaagagtgatcagtacaatatttgggcagcatttttcaatgaaatcggcggtaatgcggcttttaaactctatgttccgattctcggtggctttatttcttggagtattgcagataaagcaggcctagcccctggtatgatcggtggtatgatggccgtcaatggcgggtcaggcttcttagggggcatggtcgctggtttcttagctgggtatgttactcgattcattgtcaaaaagacacagaatgttcctcactcatacaaaggtattatggcggtattagtgatcccgctcgtagcaacctttattgtcgggctcgtcatgtttttccttctaaatacaccaatgtcgaatatgattgggttcctgacaaactggttgaaatccatgacgggcgtgaatgctttcttgatgggagcacttcttgccggcatgatggcctccgatatgggtggtccaatcaacaagactgcttcggcttttggacttgcaatgttcgcttcaaagatttatggaccttcagcggcattgatggttggtggtatggttcctccgctcggcattgcacttgcaaccgtattgtttaagcgcaagtttacaatccaagaacgcgaagcgggcaaggctaactgggtattgggagcaagtttcattacagaaggcgcaatcccatttgccgcagccgatccattaagagttatcccagcaaatattatcggcggtgcagtcggtggcgcactctgcatggcagcaggtattactttgcaagcaccacatggcgggatctttgtcatcccaattgcttgcaacaagccaattctttatattggttgtatcttagttggaacagtcattacggcgctcattttaggctttaccaaaaagactttgaatgagcagcaaatgaatcaacggatggctgccggtattatctaagctttatgcaaatctcaaagtgaatatggcgggttatttgtcctcagaaagttcggttatagttgcgactataccgggcttttttaatgctgtttatttgagcaattttaatttttaaaccgtaagcgtttacaaagtgaaaattagatgctactatgatgtcgagatgaccggacgtctagacaaataaaagtgtggaggtttgtatgacaaattggatcagtcttgctggaaaaagagttgtgatcacaggtggcagttctggtataggcagcataatcgtcaagcaaatgctggcaagtggtgcgaaagtatcctgtcttgacgttaagccatcggagtatgaaggccaatatttcttttttgagtgtgatattagcgaccaaaatcgtgtgaacgcggcgattaactcagcagctgaaaagatgggtgggatcgatgtcttgatcaatgacgctgcgattaactcgcctaagatgatttacgatttttatggcgaagaggcggggcatcaatatgatgatcgagattttgatagacactttgacatcaacgtgaaaggggtacttcattgcgttcaagcggttatgccacatctgttgtcaaataacggtggcaccattattaacatgagttcagaagccgggagtgaagggtcagttggtcaagcactttattcggcaacaaagggggcggtgaatgccttaacattctcaatcgcaaaggaactgggtccgaaaaatattcgggcggtagcggtcgcaccaggaattaatgaaccgacgccgatggggaatagtcagcatgtagcagatcttggctatacacgcggggattttaaacagagtcgagaaaaacaggctgaaaaatatctgagcaatattccgctgagacgcgtagggcgattgagcgaaatagctgatttgattatctatcttgccagtgatcattctagttatatttctggcacagtggtcaacattactggagggaagtcccatgggtaattctaataagcgtgaaccatggatcattcttgtatcacatggtcacatggctaaagaagttctagctagcgcggaaatgattatgggcaagctaaaagaagttaaaacattttcgctaattgagggggaaagcccagagaaattgatccatcaaatgatggcaagtttgcgagatgctccggagaattcaatcattttagttgacttactcgggggaacaccatcgaatgtcatttcaaagatagcaagtcaacacgactatgcggtcgttacgggcctgaatttgggaatgttgatcgaagcggagatgttgcgatatcagaataaggacaatgatccgcgtcaagtagcagagaagcttgttgaatcgggcaagaaaggcattgttgatttgaaaaagaggttggcagaaacctcaattgaggagggggaattgtaatgctggatggtgtgaaattaaccagaattgattatcggttgattcatggacaggtcatcacgaaatggactaataaagccgcagcgaatcgaatcattgtcgtaaatgacgaactggctaaagataaatttatggcatctgtgtatacgatgtctgcaccacctggagttaaggtacaaattgcaacaattgatcaatttgtaaaagcatctttgaaagcggattcatcactcgataagggcaatattctacttttgttccggtctattgccgatgccctgactgcaagtgaagctggtgtgcactttaaaaccattcaagtaggcggtcttgggtcaggtgatggtaaagggatggttgttaagggagtttttgcaagtgcggccgatattgatcagttggagaaaatccaagcaaaaggatcagaagtgtccttccaagtcacaccagaggagccaaaactgtcattaagtcgagctaaagcaaaggttggaggggaataacatgttgggtgtttcaatatttaccggtatttattactggatcatgaaaaccgatgttggttatggttttactcacgcgatgaggcaaccactgttttctgcattatttattggactcattatgggtgattttacgagagcaattgttattggggccgccattcaaattctatatatcggattagtcgctgctggatcaaacttgccagcggacgactgcctggcaggattaattgccattccaattgctattgcttcgcatctcagtccggctgtcgccgtgacaattgccgttcctgtcggcgtcttaggtgttttcttagatcaattcagaaagacgatcaacatcgtttttgttcatatggcagatcgatttgctgatgaaggtaaacctaaacaagtggtcatgtcagcgatcgtgtatccgacgttgttgtcattcgtttatcgctttccggttccttttattgccaatatgtatggggcaaaagctgttactgcatttatggatgctatccctaaatggcttacgaatgggtttggtgttatgggtggcttattaccagccttgggatttgcattaaccatgtttgttattggcgataagaagttgttgccgtggttctttattggattctttattgtcgcttatctgaaactgcctgtcatgggtgcagctatcattggcgggtgtgcgattctgttgatctctctggcacaaggtaaacgagaagaggaggagactttataatggctgaattaaacaaagggcaaactgcagagaccatcacctcacctaatcagactcctaaaattactgagaaggacgtcaagaacagttggttactctattatcttgttgctgaaatgggaatttcctacgaacgattacaggctttaggctttacggtttcgctactacctattctgagaaaactatataaaacaaaaaatgatttaaaggatgccatcaagcggcatctggtcttttataacacagaggccgtatttggttctcttatcaacggcattgtcatttcgatggaagaacaaaaggcacatggagaagatgttacctcagaggcaattactggtgtgaaaacaggtttaatgggacctctcgccggtattggtgattcgattgattgggctacattgaaaccgattatatttgctctggcggctacgttatctgcctcgggcaatccaattggcgcgtttgttctgctgctactgccaattgttcaagtgattgttggacgtactttagcgggtattggttataaagcgggccgtgagtccatcacggagatgctcgcatcgggtagaattcagcaactgattacaggtgcaaaaacgatggggttgttcatgatgggcgcgctgtcgtcaacttatattgccgttaagacccccatcaaaattaattttggatccgggaatacaacatttgttcttcagaaagtgtttgacagtattgcacctggattactttctcttgcagtcgtgatgttcatttactggtggcttaacaaacgaagccaaaatctgtcaatcgttgtgttgctcattgtggcaattgcgcttttaggcgcctttactggtttcttagcgccactaagttaacggaaggacatgaagacaatgaaaaaaagcgcagtacactttggctcagggagtataggtagaggttttattggtaagcttctgcatgattctggttatcaggtcacaatgttggacgttgatgacagcattattagtagcattaatgctatcggaggatacgatctgtatctcattaatcataattatcaaaaggtttttattgatcaggtgagcgcgattaatagtctgaaggatacgcaaggtgcgattgatgctattaaggacgctgatatcatcacaacagcagtattggcaactaatttggaaaagattgcccccatactttctaaaggcctaaaggcgcggttgcagcttagaaaggccaaaataaatattttagcttgtgaaaatctagaaaacaactcaggggtcctacgaaagaaggtattggcactcggagaaataaaggaaaacgatttagagtcaattgccgcatttcccgataccgaagtggatcgtttagtcctcaaatctgagaggaatggagagccggctattgatattggcgatgagtttgaacttgtggttgataaaacaaagttggtcaatccgggggttgaaccaattaaaaatgctttttacacgacagatatccacaaatattttgaacgaaaactcttcatcatcaatactggccattgctgggctggatatgttggtcatgtatacggctataaagttattcaagatgtttttgcaaacaagccgttgctacgcgcaacgcgagaagccatgaaagaaagtgcggtactaattgagaaaaagtatggtttttcaaaagatgatctagatgactatatctcatttgcactcaatcgttttatgacgccgggcgtggttgaccaaattgccagagtatcacgtaatccaattcagaaaattggccctcaggagcggttagttcaacctgtccagcaactagcagatcgcaacttgccttatcaacaactagttaaaggaattagcgcggcactgctgtttgaccttgatacagatcaacaagccatcgagctacaacattatattgagaaaaatggagtaaaacaaaccattgtccactttacagggattgctgaagaatctgtactcttttctcaaatcatggagcattacaaccggtttaagcaaataaaagaaaaacgaacgaactgaaggaggtggtcagattgtcgctatcattttccaataaagaaggtgtcactattcctattcgtatcatcgataacttgattaatgagaaggacactttaagtgagctggatagcttcgttggtgacggagaccatggcattaacttagcaaaaggtatgacgctggcaaagaaaaagatttcggttgcaaatgacacgatgtcttctggttttgaaaaaatagcccatgcacttgaaaatgaagttggcggctcgcttggtccacttttcggatttttctttgaagcaatgagctcggagtcgaaggatcatcaggcgatcgatggtcaggtgatatatgacatgatgactgctgctgcggaacaagttgcttatcttacagaagctaaggtgggggacaagaccattgtcgatgttctttttccagcagtggatgcttacaaggaatcatgggaacaaactcaaattactcaaagtgcattaacggccatgggaaggtctgctcaggaaggattaaaagcaactgcaaatatgctggccgcttatggacgcggacatcgtcttggtgaaaaagtgatcggacatcaagattcaggagctacgacaatgaacatgatctttcaaacgtttatttcagaagttgagaaattagttgcttaattttaaagagggggaagttaatgagtgacttgcgaagatttgttaatgatccagaaaaagtggtcgaagacgaactgaatggatatctgttagtccatggagatcaagttcggcgatcagagagaaatgctcgtgttctcgtgaatcgccaaagaaatcctcatcgtaaagtggctttgatctctggaggaggaagtggccatgagcctgcttttctaggctatttaggaaaaggctatcttgatgctgtggcagtcggtgaggtttttgcctctcctccggccgatgccttcttggatgctgctcttgaggccaatatcgatggcgaggttatcgccctgatcgggaactatgctggagatgtcatgaatatgaagatggcggcagctaaggcgggccggcagaacgtccgaattcatattttaactagcaaagatgatatctcttcagctcctaaagaagaaatcgatagacgatatggcatggctgcaggcttctttacttggcgctttgcgggttatctagcagatcaaggattagatgcagaagaaatcgttgcaagggttgagaatctgtccaatagcattcgcagtattgtggtcggcctgtcctcgctagaaattccgtctgctggaaaagaaaattttgttgttcctgaaggaaagatggaattcggtattggccaccatggagaagctgcgattgatacacctgaactgatgtctgcaaatatgatcggtaaaaagatgaccgaggctctcttgaatgattatgcccttgaaaggtcaacaagttttgtagccatgatttcggggttaggagcgacgccaccaatggaacagtacattatggcagatgctgtgaatcaagcatttaagacattaaatcattcgttaagcaaggtgtatgtcggtaacttcatcacatcacttaatatgaatggtatttcgttaacccttgttccagcagaatcacaactcgtgtcctctttagagacgccttatcaaccaaatgaatttaaaaccttttagggagtggtacttttgaccaaaacaaaatatcaagttgcgctagattctttctcattagatgatgcggtcaagtttgtacgaaccatcgaggactacattgatattatcgagattggaacacccttagtcattgatgaggggatgcatgcggttcgtcggatgattaaagaatttccaaacaaggaagttttatctgatgaaaagatcatggatggcggttatcacgaggctgatcttggctatcaagcaggcgccaagtatgtcactgtgttaggcgtggctgaagacaaaacgattcaaggatgtttagatgcagcacacgatgcagatgccattttggttgtagatacgcttaagattccaaacttggctgaacgtgctaaggaagttgaggcgatgggggttcattttatctctgtgcacacaggttttgaccagcagcagatgggaagaacgccattaaatgatcttcgaatcgttaaagcaaatacaaactcaatccgggtctcagttgcaggaggcattaattccaagactattgaccaatatctagctttagagcctgacgttgtgattatgggaggcgggcttgctgacgctgacgatccagtagacgaggctcgtaagattcgtgaggcaatcgaaaagcatgaaacggagggaagcagacaatgacagatcgaagcttgaacacgatccttgaagagttaactcaaaatgctaaatttgttaaggcagatcaacttcagtcggcaatcaattcaattatgaatgctaaacgaatctttcttgctggtgccggacgttcaggatttgcagctcgtggattcgccaatcggctcatgcatttaggatttcattcaaattttgttggtgacactgttaccccttccatacagaaaggggatttgctaatcattggctctggatctggtgagactgcaagcctagttagtgatgcgaagaaagctaagcaggttggagctcatattggaacactcacgatatttcctgaaaatacgattggcagcctatccgactggcatatcgttattccgggggttacttcaaaggttgatggtgaaaatacggaacatgggcaatcaatccagccccacggctcatcatttgaacagttgagctggttagtatatgatgcccttgtggtatatttgatgcaagagacgaaacagggcgacaacgaaatgtttgcccgccatgcaaatttggagtaaaaatagagttaagttggtacgctttgggcgccggaggcaatgaagactattaccggcgagtgaggcgtactttttttgtaggaaggggcgattttcatgaagggagaacggatcgattttgccgagaacgttcctctttacattatgattgaatccgctgttgaacagcgactcttagatggcacctatcaagttggcaagatgatcccaacagagttcgagcttatggatgagttctctgttagccgggaaacagttagaaaagcaatcaatttgttggtccagaggggaaagctcgagaaaaaacgtggaattggtacgtttgtagcttctccatctgaaactgaatggcggcttaacaatctttccaatttcaatgctatggctgcccacgctggtcaccatgcagaaacaaaagtcataagtgctaaaattgtcccatccgataaccgcttaaagcgaatatttggtagtaaggtaagtcagtataattattttgaacgtgttcgatcattggatggcgatccagttgaatacgttgaaacctttgtaccgctgaaagtcgcgcccacactgcaaactgtattaaaagacaacacttccctgtacaaggtgcttagagaccaatataatgtcatcgtttcgcatggtaaaaaagagttccaggcatcgaatagtacgagcaaagaagccaaatatcttcgaatcactgagggagatgcagttcagttagtcgcaacgacagtatctgataaagctggtagggttgttgaatattcattggctagaaataatggtatcgtcagttcgattgaactcgatatccaagttaaatgaaatacttgtagccttaaatgctacaattcatggttagataaaaaaagtagcgaacacatttttggcgatgtgtccgctactttttaatattcagttttacaagctagtttcgtgtttaaaaggcagttaagagttttaaacattgaggacggtagagggtggcttgtctaagcatcgtagtcaggttcatttgcaagaatccaatcttcggcttcttttgaccacagaccgtcatgcttggcaagaattttacctaggtctgtggcaggatctactttcgccaattcaatacgatcgaattttttgccactgtaaaccaacttttttccaccgccaatttcaggttgattcatcgtcgtttcacctgcgtcattcaaacccataacatgggtaatgactttggagacatcgagtttcttctcggcaattagctgtgctgcttcagcttcattattagcatcgccacctgatgtaccaacaaaatgagtgaaattatagtgaatgttatagaaatttacagaagctgagaagtctttcttcattgggcctgcgaactgatttaagcacccgtcaggattgagcagggagtctgctaaagttgctaacggcgcaacgctgatcatcaaaaacgcgtcatcatacccagtgccatccactgcatctagaagagcttctttctgttcatcaattgacaagccgttgacgttgacaaatttgatgtctacccaatcagatgggtacagtttctttgcgcgatccagtttgtcctgattgacgtccgtcacaacaagcgtagatggcttctttggaccatgtaatgcataatcaatagccagcaaccccatcgggcctgtgccgcccatgattaacatattgccaccctctttaatccctgtggttggttgataagagtggaagttaacatggtactgtgctctaaatgctgcgatgacgcaacttactggttcgcataaggagccctcataataagcatcgccttcaaatggaattaggcagcccatcgtcattacttcatcagggatgataatctttgtggcatccccgccaatatatgggtatgagtatccaggaacaaacggcgtatcttgacgagccaaatttggttgaatcacgtagttttggccggcatgaaactttgattgccactttttacccacttttaaaatcttcccagaaaactcatggccaagtactgctggattatgggccaagtcatctggtgtcttcttatgatcttcaccctccattgcaagtttccatgatgacatacacatcgtgtcgctcacaacagttgcaagaatttcatcgtccttcatctcaggaaggtcaaaggtgtcaattcgaagatccttcttaccgtaaattcgtaatgctgtgctttgcatgttcgtgtcctccattcacaagtgtgatatttaatttagaagcttacttatcttggctacaaactgatggtaattaagtaaatagaaatggacaagtaagcgctatcaaatattcacaaatgtgaaatagttaggacaagtcttttattgattttgctgttgcttcagttgtgatcaaagtatttaagagtccgccacgcaaagcagcaaggatagcagtgactttatcttcgccaaaagcaattccgacagaatatggcactttctttaaggcggataaagggagggcaacaagaatagagtcaatatcacgagttactttgccgtttttatcgaagggatgggaaaggatatcgcctaccatttcagcactgaaatatgacttgaagtttgtgttctcataaaaggcttgccagtcgggtgaatcagtgatgagcgagctacccatcccaaagatcgcaatattgacacgtgtccacaggctaaggatttcttgcgtgtttggattagctagcagctctttacgtaaggcttttgatctgacaaaggctggcgagtccaagacaaaggccgttccgtttaatcgattcgcgagccgatgtgtcaggtagtttacgtgatagttcgaaggaattcttcccattggtccgccaacaagtgggacaactttgatgtcatggagtttcttatcggttgggaactggctgataacactggatagagttgatccccagctcaagccaatcacgtcgtcactcttgatgattttggataggaacatggaagcatagacgctcagcgcgttcaattcattgccgccgttctcggatgctgggacgatgacggcgtctcgaaggccgtacttttgtttgaagaaatctactagttggctaactgcagttgtttcgggattaatggcaattgaaacaacgccttcatctctggctgccttcagaattcgacttatttctgtgcgatgaatatgtgcgatgtcggagatctcttgttgtgtcagaccgtgcatgtagtaaaggtcagatattttaactaatgttgctcgatcatatcgctttggtaaatttgacattattgtcacctcaaaaagcacaaatgtgaaattattgatcggtcttcttgtaaccggttacattccaattataatcaaaagtgaaacaggtaacaacatacatttaacatttgtgaaggtaggaaggagacgcatcatgtcagattggcttggtttgtcaggaaaaacaattattgtcacaggcggttcatcaggtattggggaagccatcgtcaaagagttgctacagaatggcgctaatgtcgtcaatggcgatctaaaaaagggcactttagaggatcaacatctaacatatttcaagactgatgtcacgaatcccgaagaagttgaaaatcttgctgcagaagcagagaagattaatggcgaaatttggggtgttgttaataatgctggcattaacaagccacacgtcttagttgatccaacagagccacatggaaagtatgaacttgatgctcgtacgttcgatcagatcttcaatgtcaatgttaagagcgtttttctggtttctcaggcagcggctcgccgaatggttaaacaacatcatggtgtcattgtgaatatgtcctccgaagcagggctagaaggttctgtcggccagagtgtctattcagctagcaagggagcgatcaatggctttacacgttcatgggcgaaagaattgggcaaatacaatattcgagttgttggcgttgcacctggcatcatggaagctaccggcttaagaacacctgattatgaagaagcattggcatatacccgagatacaactgtggaagccatcagagcaggctacaagtccacatctacaacaccaatgggtcgaagtggaaagcttactgaagtggctgatctagtcaactattttgtttctgatcgtgctagctacatcacgggcgtcacaaccaatgttgcaggcgggaaatcgcgtggttaataggattttaagattggagatgtgctagatatggaaataattttagttgggcatgcacatactgctaaggcttttaaagaagcggtagagatgatttatggtgaggtgccaaatttccatccaatagatttcacgccaaaagaagggttgcaatcgctgacagacaaaattgtttcggcaattgaacctggtaaaacggcaagcactttaatcattactgatctattctcgggaacaccctacaatgcgtcagcagaattagttttgaaaaagaaagcggcggatgttgttgcgggaatgtgtttgccaatgctattggaggtcgcagttaacgcaaataatatgagcgttagccaactggtttcacacttgatgaaaatcaaagaagagttttcaacgagccttagcgagaaaatgacaacgaatgcaaaggaggacgatttctgatgattatcacacttgcgcgagttgacgatcggttaattcatggacaagttacaacagtttggtccaaagaatcgaacgcagatcgcattattattgtcagttcggaagtttataaagatgatattcggaaaaccttgttaaagcaggcagctcctcctggcatgaaagtcaatattgttgatgtaccaaaagcaattgccgtttataacaatcctaagtaccagaatgagaaggtgttttatctatttacaaacccacgtgaagttgtggacttagtaaaaggtggcattcctctagaaaaattgaatattggtggtatgcagtttaagcagggaaaaactcaaattagtaaagcggtctctctggatgcagacgatgttgcagcatttcgggaattgcaccaattaggcgtaaaactcgatcttcgtgtcgttaagacagacccgtcgtcagatatcttagcaaaaatcgatgaagtttttggaaaggaataggcggtgactattaatggcaatttctaccattcaaattattcttatcttcatctggtcctccgtagtcggtatggggagcgttctggatgaatttcagacacatcgacctttgattgcgtgttcaattatgggcctgatcttaggagatccaaagaccgggatcattttaggcggcactctggaacttattgcccttggctggatgaatatcggggctgcacagtctccagattcagctttggcaagtaccatttcaacaatcttagttattgtgggtaatcaggatattcaaaaggggatcgcgattgctttgcctgtagcggctgcaggtcaggttctcactgttctggcacggactgttacggtggcatttcaacatgctgctgaccgtgaggcggaaaaagcgaactttactgccatcatatggttacactttacagccttaattgtacaagcgctccgggtctcaattccgaccacgattgttgcggttttcgtaagtccagaagagattaagagcatgttagatgcattgccagaggtaattactggaggactagcagtagctggaggattcattgtggttgttgggtacgcaatgattcttaatatgatgagtgttaagtacttaatgccattcttctatctaggctttgttctcggcggttatttgaaactaagtttgctagcttggggcgctgttggactgatctttgcgattgtctacgttcaattgaatcctaagtttgcgacaaatcataataacggcacaggtggctccggtgggacggttgcagcggctggggatcacccggctgccttaccagaagacgagttggacgactgaaagggagtgtattgaatcatggctgatcaaccagtacaagtaaataaactaaaaacaaagattacaaagggagatatgtttaagacctttgtgttcgaaaactttcaacaagcatcttttaactttgaacggattcatgcacttgccttctgtgtcgatatgattccaacaattaaacgggtgtattcgaagaaagaagatcaagttgcggctttgaaacgtcatcttgttttctttaacacaacacccgctatgtgtggcccgattgttggggtgaccatggccctagaagaaggcagagctgccggtgagccaatcgatgatgggactatcaacagcttcaaggttggcttgatgggacctttggcaggtgtcggcgatccgcttatgtgggggacattgcgtcctattcttgcggcactaggggcgtcactggcccttcaaggatcatggttaggcccgattctattcttcgttgcttttaacgcagttcgtctatcgcttaaatggtatgggctgcaattagggttttcaagaggtctggcactcgttaaagatatgagtggtaatcttctacaaaagattaccgaaggcgctaccgtactgggtctcttcatcatgggcattttagtcacaaaatggacaaccatcaatgtgccgttagttgtttctaagacaaccgttaatggcaaaacaacagtcacaacgttgcagaatattttagatcagttttgtccaggactcttggctctgggatggacattgctgtgcatgtatctacttcgaaagaaagttagtccaattcttttaattttcgcattgtttggtgttggtattgttggttattggctcggtattttgaagtaagggtgagttaaaacgatcaatcaaaacacattaataattgcaatcggactcattcttttgactagcggtttcttagtgaaacctgagaaacaaggcaagaagcagaaatacaattttctgtatatgattgcaggtgtcctcatcgtactaatcggcttgaaagtaatttagggaggggttgttcaattatgccacttgtatcgacaaaacagttggtgacaacggcgtatcaaaataaatttgctgtcggtgcattcaacgtcgggaacagcgaattcgttaaaaatattattgctgttgccgaggaattagagtctccggttatcttagaaattcacccacttgaatatgagttgatggggagcgccatctttaaatatattcgagaggcagcactaaccgccaccatcccagttgccattcatctcgaccatggtaggaatatggcggatgtgctgcgagcaattcaagatcaggcaaattctgtcatgattgacagttctggacttccttttgaagagaatctgaagacaacaaaacaagtagttgaagttgcacacagtgttggcgtttccgttgaagcagaacttggcagtattgggaatagaaagttcacagaagaccagaatatgggtagaatttatacagaccccgaaagtgctaagcaatttgtcacagaaacaggtgttgatgatctagctgtggcaattgggacagttcatggcccatatccaagcggcgaaaatgatatacgaattgacatcttgaaacaacttaatgaaacattgcagatgccactagttctgcatggtggatcagataatcctgataataagattcgagaagcgattcaaaatggcatatcgaaggtaaatatttcaacagatattaaagtgccgttttatcatggcattgctaaaactgttgcagataaaccgggtgaatacgagccatggattatgatgccatatgcggatgaggcgcagaagaaagtgattgctgaaaaaatacgtctgtttggtagtgatcataagtcgaagctttactttgaagacgcgaaacgcttgacaccgtatttctgatctttattggaagaaagtattttagagaataactcaatgaacctacaccgcttcttgagatcattagaaatcatcgagtgttttaaacaaaataaagaggtcgcgatatcttgttgaagtatcgtgacctcttttgtatgcaggaaaccgaggtttctgactgatttatttaaagataatggatgcaagtgggtatccgacaaaggataagacgaccacacctactagtgcaagagcaagtccatacttcagcatgattctcaagtctacccaacccgaaccaccagcaagtgccattggaattgttgaaggcggcgttgaccaagcataggacgcaccagctgcaattagaactgtcagtgctgctacattaacatttccaagcgttattgctaatgggatgagtaaagaatagaagacagttgccatgatagtgctagatacaaactgttttaacattacaagtaggaacatggctactagtacgaacagaaaactggaaaagtcgccaacaataggaccaacaatttttgcaaagtatttggtgatacctagtttatcctgaactagtgcggcggaaagaactaaaactgcggcgttgaagatgagtgtattccatggaactccttgtgttgaagccactttaaagtccataactggtttgccgtcaacattaattaaacagagtagtataaccccgataaatgcgggaatcgcatttccaagagaggacatataggctccaaaggcagggaaaacatttccaattgtaccttgaacaatccaaattgcaataacgctgacaaaaacaaccgcagcgattttttcttgcttagacattggcggcagttcgccgcgcagtttttttgaatcaaaattttgaagagggcgtacatctggacgataaaagaacttatagattagtataaacgctgcaaagacaagaacaccagtcacgatgcctattatgctgtaagataaaacatcaatattgatgtttgtgtcgcgagcaaggaaggttagcggaattaagacgatagcatgtccgatcggtgtcatcgaggatccgatacccacacacattgctagtcctaagataatcatctgaggtaatcggtccccctttttcaatcctagttctttaaataattcctcagcaattggtataaatactaataaagctgcggtttgggacatgaaagctgagaggaagactgatgcaaagagaaatatgatgatgaaagtccaaggcccgcggcttgcaaacttattagaaactgaccaaattgcaatgcgttttgagagacctgtttgggccattacatagctgatcatgaaaaaggcgtaaagaaaggaattcacccaatttcccaatccattagcaaagacctcagtctgagtcatgatttgaaatacaacgatggtagtcatacaaagcagacttgtccacccgatcccggcaaaattccaaagtagtagcataccaacaaagatacctatcatttgcatgctgtcggctgttagtccggctggagcgggaatgaacctaaataggaagataagcgcgaatgaaatcacctgcataataaatttgacgttaatttttcttacggtagtttgtctgttagctgtttttgctgtggtttgcatattagtttacctcacaggtacgtgtgattagattttcttgatccatgactgcttttatttcagatgtagttaagttataaacatctttctgattgctaattgcgtaagcgaagatagcgccgacggattctccgacattcatgacaataggcattactctagttgcagcgaatgtttccgcatccgttgatatggctttaccaaccaccgctatatttaaatcttgtttaggtaagcaaacagcaaatgggatttggtagattccatttatttttagaaaatggacttttttggtaattggatcgtgaatatcaaccggataacaaccaacaccaacgcagtcatcgaactctcttagattgctgatatccgatagttttagtgttgatcgaccatcgagcttaacactcgctcgaatacccattattggtgcgatgttggaaaggtaagccttatcacatccaggaatcttttttttgatgaatgccacgattgaactgatttgttgtcgtccttcgcggagtccctcggaaagttgttgtgcatcgcgataatcagtgttggttctcgtcacattgacacttgcatccatggttcccggaattggcgcaaatgccagaatcttgcccttaataatgccttcatcaaatgcctgattgacaactgcggacaaagcaccactatcgataaaatcttgaagtgttcgtaaatctatgtttgataatctgaatatctgtgttgaaacagctatatcattgctatgcattggctgtacttgacatccaaggctagtagccactagggagttactggttgcgtcaattagatattttgaagaaagtcgaagcggatgaccgaaattttctgcttgaactgtaaagccgctttcggttttcttagcggattcaaaggtggtattgtaataaacttgaacattatttttggacaatagctcttccaaaatcagttttaatatttccggattataacgaaggcgatctaccttaatatccttatctgaagacataggtaactggtaatagtatttgccggctttttgctcaagtagcttttcaaatatttgcttttcaaatccgtgataaattggttttttcaagaatgatgcggcgttgaattcggccagtcccgataaagtggcatttcctccacagaccgagtgttgttcaacgatagcaactttaactttcttcgatgcagcctttatggcggctagaacacctgcagttcccccaccaatcacaattaaatcaaagttcattgattcatctcctcctcgctaatgtttgagcaacctgttcaaaagatcacatcgacagaataagatagcgctttcatttgtgcaatcgattatgtacgatatttgtatcgataaaaccgatgcaaattttgacagctaacaagggggatactcatgaatcttaaccaattaaaatatttcatggtacttgcgcgagttggatcatacagtgaggcggcttaccaactgaatattgcccaatcaactttgagccaagcaattattaaacttgaagaagagttcgagacaccgttgctttatagtgagaagagggttagttatctgactggagccggaagtattctagaaaaagaagcgcagaagatcatcgggaatgttattaaaagtaaagaaatgattgctcaatatttaaatggtaatgttggaaacgtgacgattggcgtttctggttcatttggtgtcacaatagttcctcaagttattaagacgtatcaaagatttcatccagagaatcttgtgactgttaaggttgttcaaggtaacactaatcgcctggttcaaagtattcgtaatcatgatatagatttagggatttgttcttattcgccacgtgatgccgatgtgcaattctcgctaattaagcgagaaccctatgttgtgatgactagcaataatcacgaattagcaaaccagaatactgtttccgagcaagatgtccttaaatatcccatcattacttttagtgcgcaaagtggtgcatattatgatgttgctaatatattgggagttgatataaatcaacttgacgttgcaatgtatgtggacgattccgccatgatggcagcaatggtggaagctgggattggaattgcggttatacctcgcatctatttgcttgaaaactttaatattgcgatactgcccttcgagacagttcgatatcgggatgtttactgtgcttggttaaaatatcagctgctttcgcctgtcgcaaaagaatttagatcgttgatacaacaatctgcaaatattactttgtagaatcatgttagcaatcttcttcaatctgttacttgtgttgtgactttactgaagtcttgacagtgctatctggcttgttagatagcacctttgcctttacacccgaacatttctcggctaaactcagaatacattcagttatttcgaatcttggtggttatgttcacaacaagcacatcgtcaatgatgcaattggaatactgaagaaaataggatcgcgttcgacaaaccgattgggcgccaatgggactgtcgacgcaagggggacagaaaatggcaaagttagtcttacaaacagattttgggttggttgatggtgcggttgctgcgatgtatggcgtggcctatggcgttgatggtgagttgtcgattcatgatttgacgcacgagattccgccgtatgatatttttgcagcgtcttatcggttgtatcaaacgacgaagtattggcctgaggggacggtttttgtttcggtggttgatcctggtgtcggtagcgatcggcgtagcattattgcggagacggtagatcatcatttcatcattacgccggataatgggactttgacgcatttagcaaaatttgtcggattgaagcggctgagtgtgattgatgaggcatcgcatgccttgcctggcagccaggagagtcatacgttccatggtcgtgacatttacgcttacaatggcgctaaattagcaagtggccagatcacctttgaggatcttggcaaagaaatcgaacctgagcaagtggtgatgttgccattgggtgaggttaaagaaagcgctgatcaaattgccggtacgatcgatattttggatattcgatttggctcgttgtggacaaatataccgttggctacctttaagaaacttggtgttgcagctggcgagtttgtccaggtatcgatttattatcacgatcaattgcgttatcaaaaccagatgccgtttacccggacatttgccgcggtgcgggttggcgagccgctggtttacgtgaattcattactgaatcttggcgttgcgatcaatcaggactcattttcaaagctgtatcatattggtactggggttgattggcatatcacggtgaagcggctttcggtataattgaatgcatgaacagtctgctggcggcgatggctttggcggctgctcaacacgggtaagtaacggtacgtttgacaaggagggtaatcatatgcgtgatcaaaaggctttgagcgtacgtacagtggtggcaatcggtattggtacggctattttatttattttgaaacgatttgcggtgattccaacagggattgcaaatacgaacattgacatttcttatggctttcttggctttatcgccacgcttttcggcccgattgccggctttttcatcggttttttagggcatgctttgaatgattttacgcaatacgggacaccatggtggacatgggtattcacgactggtttagtcggcatggtgatcgggttgttctggcgtcgcttcaatgtcgaagcgggcaattttggcatgaagaaaattgtaagcttcaatctgttgcagattattacgaatgtggtgagttggagtctgatcgcaccaacactggatatttggatttacagtgagccggccaataaagtttatgtccaagggatcgtgtcagctatctcaaatagtattgcgacaggtgttattggcaccattttgttggtcacttatgcagctacacgcacgcggtctggcagtttaaagaaagagtcttaatatggcagcaccagcaattcagcttgatcatgtcacgtttcagtatgacagtcaggcggaaccgactttgcatgatattaatctaaccattcaaccaggagagaaagtactgattgttggcccgtctggatcaggcaagtcaacgttaggtaacttgatcaatgggttaattccgcacgcttttccgggcaaattgagcggcaccgtaaccgtcaacgggacggtggttcaggatgccagcttggcgacactttcactgcaagtcggaacggttttgcaggatccggatgctcagtttgttgctttgacagcaggcgaggatattgcctttgctttggagaacagcgctgtcgcacctagtgagatgcatacacgcgtcaaaaaatgggccgatcgtttgaaaattggcgatttactggcgcaagcaccacaatcactttcaggcggccaaaagcaacgggtggcgatggccggtgttttgattgatgaaggggatattttactgtttgatgaaccgttggccagtcttgatccggccactggtgaagcatcggtagacttgattgatgagttgcatcagacttatcacgtcaccgaagtcatcattgaacatcgtttggaagatgtgttgcggcggccagtggatcgattagtcgtgatgaaggacggtcgaattattgccgatgatgccccggaaactttattgcatggacagttgctgcaacaaatcggattgcgagagccgttatacttggaagcggctgagtttgcgggagttgatttggatcaggcggatcatttggctgacctttcgcgttttgaggccccacaactcagacccaagttggctgctttcacagcggaggctgcgactgttaagccggagcagcttcaggcaccgttattgtcgattgacgggttgcagtttggctatcctaatggccgtcaaatttttaccgacctcagtttcaccttgcatcatggtgagatggtggccttggttggacgcaatggggttggtaagtcaaccttgagtcatttgatcgccgggtttttgaagccgggtactggcaggatgacgcttgatggtgaggatttggctgattggtcggtgaaggaacgcgccgataaaattgggtatattttacaagatccaaatcagatgatcagtaaacacctgatttttgatgaagtcgctcttgggccgcgtttacgtggttgggacgagacgcgtgtcaaaacagcggtcattgaggcgctgaaggtttgcggcttgtatccatttcgatcgtggccgatcaacgccttgagttatgggcaaaaaaagcgtgtcacgatcgccgcaattttggtgctagaaccggacttaatgatcttagatgaacccacggctggccaagattggcgtcattttaccgacatgatgcgttttttgacgaccttgaatgaacgtgggattacgatgatgctgatcacgcacgacatgcatttgatgttggagtatgcgcagcgggctattgtgttaggtgatggtggtatcttgatggacgactcgccagcagcagtgctgaccaatccggccatcattgagcatgcttccttagcacaaccaagtttgtatcgcctcgctaagcgtgaaggccttgacccattagccttcacgcaggctgtgattgaccaagaacggagggtgcgccaatgaactcactttttggttatgatccgcaagacacatggctgcatcgattaacgggtgcgacgaaaatgctcgcgttcattggtatctcggtcattgtgatggcgagttatgacacacgctttgtctgtgcagtgatgctcgcatcgatcattctgtttgcccaagctaaaattcattggcggcaaattagtttagtggtcaaaattattacgatttttgcagtggtcaacctgctgctggtgtttgttttttcgccacagtatggcgttggcttgtatggcagcaagcacgttttgctcaatgctggttacttcacgattacacaagagcaattattctatgaaatgaatctagcgctgaagtatattgtaaccgtgccactggcgctgattttcttaatcacgaccaaccccagcgagtttgcagcgagtcttaataagctgcatgtctcataccgaatcagttattctgttgcgttagcgttgcggtatatccctgacgttcaaacgaatttccgccaaatcagcctagcgcagcaagctcgtggttatgagctgtcacgcaaggcaaagctgtttcagcgactgaaaggtatggggcaaattttgctgccgctgatctttaccagtctcgatcgtattgatcagatcagtcaagcaatggaactgcgacgttttggtacaggcaagcggcggacgtggtacatggatcagccgttgcgcacgcctgactggatcgtgctggccggtgttgccgtgattatcgtcattggcctgtttctgtttcatgttaatggcggacggttttataatccgttccgaggatgatgtaaaaaaatatgaatattgcttcatcaaaaaagttcgatggtcgtttaacggatcaccgaactttttttatgtgctgatgttgccttgaccaactgaagacagatgaagtagctgctaacgaacaatccctcattggcttcgatggcgctgattcagtgttgaaggtgtatctcaatggcgatttcatcgggcatagcaagggtgcccgttaaccaagccattgaattgctacgaaacactaatgatgccatcggtgatattgccatcaaagtcggtttttcaagctacgtgcagtttgccaaagctttccaaaaagctagacaaatgtcaccgtctgcttttaggaaggctatttcaaatggtgagttgagtccacggaaaattgattaaggccagatgatcctgccaagtaagcatgaaaacgcaaagttaaaacgtcattcttaatcagtatataaaagaaaaatttttcgtttcctgaggtttgcttatttcatattcagaaccaattataagtgtcgattattttctgaaaacaactcttaaatttattaaaacctaaataatcgaaattttacttcttatttttaacgattagttttttatacaaaagcctgttgttttaagtgcaattacgatgcataaccggcgcatgtaattataatgggaatgatatactaggtagtggctgttgaactaggccaccatatcttcgacccttgtagtaaatttatagcgaatttgataggcctcaccctcgaatttagccaaaattaaaattggtatagcaaatacccttaacagggtcagcacattgctcaagacgatggccgcgtcaatcttgacggccagtgattcagctgtccgagtgttcaccaagccaagccccagcgtgcccttcataaaagcaaaccggcgttcaatggtacctcttcgattctcggcatcagtatcctcacgccgtttcgctgcatcaacgtgttttggatgccggccaagcttcggaccgcagattcggatacccaaatccttacacagctttaggttctcccgattacggtacagcgtatcggccagtacttcatccggataatgtccatgaaggtcgtaatagtggtctaaagtttccgcgaagtcttggccctcagagaatgcggtgaaatcaaaacgttcaatgtcgactacgccttcacttaacgaacagtcaatcttcgccccaaattcaactttagcattggccttaccacgttgaattgggcgaatgtacggctgttggagactaacaattcggtcttcaacgtggtgagtcttgtgggtatacatgtaccattgctggtcaaatagaattcgaatcacgcctaagcgaatcgcttgttcatctggtagagtcgcaccctgatcgatgaattcgttgatgtaccgcaaatcacggcgcacatattgaagttgggccttgacctgtttatgaaagccaccacgctgttgctttggatgtcgtgaaaatgaggtccaacaatgcttcgcctcgcgtttgtacatgcgtgggtttggcacaccaagttggtgtgccatatcgatcgccatcgcctcaagattcagccttgcttggttgaggaggacggtgtcttgaggatacttgattttgactggcactgcggttgcgtccgtgatgacggtgtccactttgaatgggaccaacgcttcgatcttggcgcgtactgtatcattcatgatattcgtaatcagctcggagatatcggcaattcgtttgcgaaagtgtgccaggctggaataattgaacggctcaaccgctttgtattcggacaacccgatgaaatattgaagtgcgggtgtatcacgaattgccgcaaccaccccacgatcagttaaacccatccgttgttggatcaggattgccccatagagtaaacgaaatggttttgccgcacgtcccgcatttttggtgaactccaattggtatgcctcatcgagagctttccagggcatgacctccgccaactggacccactcattgttagagctaagtggggtacttaaaccggcaccaaaggattcaaatgacaattgaagcgggctgtgacgatagaccatacgataacctccgagtaggttcccaaaaaatgcaaggaaaatgcaggaaaacagctaattccaatggatttattataccgcaataatgcatatattagcttaactgcctgaattatagaatttttaagcagccactaggtataatacaacaaaaaagttatacgaaaatattttttatgatctagatgtagcgaaaaaatagtcgtaaatttagaacatcaaaaagctcaagaacaagtgcgtacacttactcctgagctttttgttttgtaactaaaattactggaaacaattatagggaccatcgtctctagttcatgatccgttcaagcactgtgcaaatttatcgtcgagactggttcgcagctctgactgctaaggactgccgcttcccatcccgttaacccagtttaaagttcctaggttataagaatcaccaccagcgatttgctccaatgccaccgtatctagaagtgccaagttgtctttcccaaagaattcatctctaaagagttcttaattgcgcatcattatactatagtggatacattatttttagttaagatcaaagaaaaggctttcacggaatcgactgtaatggtattattttgatcaaggagtgattcgaaatgaacgaaaaacaagctattattgccaaaatgttggaattacaacatttttttgagaagcaaccagatggaacatcccgaaagattgtcttaaaaataaaacaagcaatcgataaacttgctagtaaccgaacagcagctatcgatatttcaacacaagtgcgtccaatcagtcgttttatcagagatgaaatgaccgagcataactatcaccttacgctggagcagcgtactctcctttttgacatagaaggcaaagctcaagatgttgaaaataaatttcaaacagcagcagactggttccttttttagtgacttgattttctatgaaaaacatcgtcaattagcgcgtgaaatgtcgcagatatagcttgaatcccttgtcaaatatatgaagctgctcatgatgagttgcgttgttcagagaatacttttaagtggtagttttgatggacttacaggtacttgttaggctcaagtaagcaaaggcccccgctgtgttgcagacagtgggggcctttgcttcttgtggattatttggaatttaatgaatcacaagtcctaagaggaaattatggttcaccttcgtgcctttttgtcatgtgatcacgccacaaaaataaagtccttgagcagctgataaagcaaagcaatttcgtagtcctgcaccttgatattgaatttttgctcaactggctgaaaaatgccgctggaaagggagaagaattcttgctcagggggggttaaggttgcgcgatcaattgaagtagtgctgcgtttgctggtcatcatgcgttcaatcattaaggacaagtgcatgaagagattgagctttagtctggatccgaatttgacgttgtagaaatcttcgtagtgggagacaatgcgttgactttcttgaatgacaatatcgggattcaggatctgcaagcggccgcggataccttcaatcgacaagaagcgaaccaatcgatcaatgagttcattaatggactgggggctttcaccacaattgcgtaggacagtttgcattttttgtgaggaagccttatcgaaaacattatagacattcacgatatcaatgccgatatcggccgagatatcgccagcaacatcggtggtggttaagattaactgggtattggagaaaaattttcgatcatgattggtgagcagggtatggagttctttgtagtcaacagcaatgacttcaagtgctggcgaaagggtcgcatcaattagctttttgacttcttcagacagaccgacgccagacatgcaagagacgataatgttcttcttgtttgataagccttcgtaatattgggcttcagttgttgcaccatattgctcgctggcttcagcgatggactggaaggcatcattacgctgaacgcgcaggccaatatcgagcgccatagcagtagttacgttgttgaccacaatcagttcttgatcagatacctttttaatttctctgaacatctggcgcaaagaacccatatcgaataagacaatattacccttagcagatggactttgatcggttaggtattcctgaacgtaaccgttgatttgatcaagtgtcacatcaatgggcatatcaaatgcctcaaaaaagtaattaccgcaaagcgaattcaccacttgctggatgctcgatgcggtgtgttcgccgtgagcaagcaggatggcattgtattgcactgattcgattttactttcgcaatgaatcatcatcatgaagaatggcaaataatagtaagggctttgaacatactgcgcttttaacttagtcaaaaagtgcttgaaaaggtagtaacttcgaggataacggtgcttgattgctttctgaattttcagtgctgattgtgtgtctggcaagttgtcgcgacaaagacccgcgaatgcgaaggcaagtgccacattttgccagaaaatattgtcgcttggaaacgttacaccatatacatgcgtgatatacgttttagcgtctttttgaatggcttgcgcaaatacagatagaagtttttcactagcaatggtatcgacttgattgagtactttcgccagaagaaaattctgttcagtgatggactcgccattgtttagcgagtcagaaagtttcttaaaaagcgcatcagttgttgggccaagctgcaacgcgctggtgatcaaagatgtgattcttgcttgcaaggtctgttgtttaggcgttaccagaatcgcacttgtatcggtttgaccaagccgtagctgcgtgtggtcagacgctttggcataggcgccagcgcaaagcaactgaacacggttattcaatgccgtgatgttattgacgtgatcaaaatttgccagtttgatcaactcgtttggtgcgatcaagatctctttattgatttgatcagcctgttgttgaaggtacatcgccgcaaacgtaatgcgctcgtttaaaggtcgatcgctaaaagcgcttagtttaatctgaaccgctgcacttttgaaccagacgcgcgctgctttgaaaatttcagttgttcctgaatagatgtaacgaaaagcagtggtttgttgctggttggtgtgcgtgaaaagatagtgttgatctgatgagcctagcatctgcacatttttaatatacaagtagccactttcggcggtgccatctgccgtcgtggcattgttctcactttgcaacttctttttgagtgtcccaggatgatccttatagttggcacaatcaatgattttaaacacagctgttttcttaagcacttcacgacgaatggcttcgtgataaattgcctgagcaaatggcaacttgccactaccggctggaccagtgatgaagatcggcaatccatgtgttggatagacgattgcttcgattgccagctgaatgttagtgcttaaactaccgtggacaccgattaagtcgtcaaaagcggaatggtcccgcttgacttgccagtaaactggtctactgccggtcttgagcagtttgccttgcttttcgagcttagataaataactactggtcacgccgcgtgttagccccactgcatcggcagcctgattagttgtgattcgttcagttggaaagtgttgcacaattgtcgcataaagtttttctactgcgttcaaagaaaccaccccttaagcactattcccgcaaattaagcacaacgtcttcgtgacttttattagtaatgtgcttaacataatcattgtaagcgttaaccttgttgacgtccagatatagagagaaaacgacttacataacgattgcagaagggagggcgttcctcgcggggacaaccgcaatactgtccgaacaataatggatcactttcagttgtacttcggttgattgtcgccttttgcggtaaatccatattttcatagtcttgataaagggatgatttagatgaaatatttgcttcttgtcagtcacggtgatttctccagtggcttaaagcaaaccttgggtatgtttgcgggcgatgatgcgattggttctgtcattgcggttggtttaaaacccgatgaagcagcttcaacatttggaacacggtttgaggcattgctaaagaccctgccagaggatgcaagctttgttgttctggcagatattgtcggcggtagtccactcacaacggtttgcaacattttgaacgaccatggcaagctgcaagatacgcttgttcttggcgggatgaacttcccaatggcgttaaccacattgatgtcgaaagacagtttagataactcagcgttaaaagaaaaagcattttcagaagcaaccgcggccatcaaagaatttcagacgacctcatcagaagcttctgacgatgacgatatttaaggagtgagcaaaatggcaatttcgtttgtacgtattgatgatcgcatgattcatggcttgatcacggttcgttggggcaaggaatacccgatggatgggattattgcggtaaacgacaaagcggcaaacaatccgattttgaaggaagcctatatggcagcgtctgacaagaagaccttcgtttggacgttagatcattttgacaaggttaaggataaggtgttgaactcagcaaccaagtattttctcatcaccaagagtcctcaagatatgaaaaagatcttggtcgatatgaacttcaagccgggcgacattaaaacagttgttgtcggtccaggtaatgatcgcgacaacgcagtcaaactcggagacaatcagtcctttacccaagaggaaggcgatgcctttgaagcgattgagaaggctggttataaagttgagtttgcgctgttgccagatcagcggattggtagttgggacaaattcaagtcacgctttgggtattaatggttgaacaataacgcgctcgccagcgctgaagcctacgtgtaaggaccttggtcgcaatgaccaaagaacggtcatcacgcccaaggacgcttacactccggtttcacccgcgctggctcgcgctcacaaaaaaaggaaggtaagaaaaatgacaattagttggtttcaagcagctattttaggtgttttcgcttgcttatgttccaactcatgtatggctggacaagcggttggtaattataccattggccgtccattggttgggggtcttgtctgtggcattattctaggtaatcttcagttagggattgcctgcggggttgcgatgcagttggtttatatcgcattggttaccccaggtggtactgtttctgccgatgttcgtgctatttcttatattgggatccctctagcaatggttgcgatttcttcgcaaggattgaatccgctgggtggcggtgctgctaacttggctaagtcagttgggacattagtcggaactgtcgggacggttttgtactacgctgttgcaacaatgaacctggtttggcagtcctttggttggaaagacgttcataatggcaagcttgataaattaacagctgttaactttggctggccttggatctcacatgcattgttctcatttttaccaacaatgttactcacctactacggtgctacggcggttacagctttgcgtagtgccttaccaatggacggcattgccatgaagacactgttcacggtcggcggcatgctgccatgtgtcgggattgcgattctgcttcggcaaattgttggtaaagcagctgatttcattccgttcttagttgggttcacacttgctgcttcactacatttgaacttagtctcagtcacagttgtatcgttactgtttgcggttattatttatgaaattgagatgtctggttctaacaacacaccttcaaaaggtagtgcagcaccagcagatggaccaagtgacgatgatgatgaggaggatatttgatcatggaaacgacaaatgacatgaaaaagcttgatcacaaaacactgacaaaatcttttcatcgttggttctggggtgcgttgacctgcttctcacaagaacatatgcagacttttgggtatatggcatcaatgctgccaattctcagaaaactgtatccaaaacatgatgaccaggtcaaagccattcacgcatacaccgcgttcttcaacaccaacccaatgctcgggacggtgattgtcgggatcacggccagcatggaacaggcgcgtgcgaacggtaaagaaattgacggcgagaccattaacgatatgcgtgctggcctgatgggcccaatcgctggtattggtgattcattgattgatgggacattgattcccattctcttagggatttcccttggtatgtcgactggcggttcaccagtcggggcgattttctacattgttgcttgggtactgatggcatactttggccaacgtttcctttacttccgtggttatcgcttcggtgatcaagcggttagtttcttagttggtaaacaaggcgcggctgttcgtcacgctatcgggattgtcggcagtatggttgttggtggtgttctggcatcatgggttaacgtcacaacatcactcaaattacgcggtgctgatggcaaagtcttcctgaatctgcaagacaagctgaacagcatctatcctggtttgctgacagtacttgtaacattattctgctggtggttgatggcgaagaagcatgtttcagctatctggaccatgctgctactcgttgttgtttcgctcgtcggtgttctagttggtttcttcaaccctggcctgtcttactaaactacgaacgtgtatggaagaaggaaaatcaaaatgacaattgacgaaatgactaagggatacgaaaaagaagttgcgtatcagaagcatatgttgaaaaacctaggctactggtttcaactttgcaccattctcagtggcgttggcattgttctgatctacttcttccatggcaagaccttgtggttaaacatcgttggcattgtgctcctagtcctgggtgcactgggcatgttgatgttcggatattcaggttggaaagggcagcagaatgttcgcgcggttgttgacgactatgacaaaaagattcgttatcttaagcatggcgcgttgaaggcagctaaaaagtgagcttttttcatcatcaacaaggttgctaaaagttgacagaaacagctatccattttgtaaaagcacatgctatattaaagacagcaaaaagccgttgtgcgcaaacacaacggccgggcaaatgcccttgcaaagccatcaaacaaacggtggcactcagaattaggcaaccaaaagtcgcgacaatccggtgaaggaagcgcggcttttagtttacctacttttctcgaaatgcttcgtgcttgcataagttcgtgaactgctagaagcagcttgatagctgcaagtaactcagagatttatccgccctaagtcgggttaaaaattaacagacacagctagccattttctagaagagcatgctatactaaagacagcaaaaagtcgttgtgctcgaacacaacggccggacaaatgtccttgcagagccatcaaacaaacggtggcacacagaattaggcaaccaaaagtcgcgacattccggtgaaggttaacgcggcttttagtttgcctatttttctcgaaatgcttcgagcgcctgcataagttcgtgaactgctagaagcagcatggtcgttgctttgatcaatcgtgcgaacacgatgatcagcactaccaatgaacctacacaggctgtgatcgttgtgatgatagcgatcaccggcaaaacatgacacctttcttttaaaagtgtgggttataggaactagtcccataggcaccacctactttccgaatcaggcaccaccgctcattatccttctctgctggcttcagtttatcagagttgcctgtagcgtgacgacctcacataggacaacgggtgttatatcttgattttcaattttatttagaaacgctcagttactgtgcatatacgttttaatattgataaccttttggcggattatttttctctatgaaatttgataaacgttaatacaagcagccaaaataaattttgcaagcccaaaacgacgacctttgcggatcgtcgtttttgattgcgcctgacagaggaaccagctaggcggcgtgggagcggcaacctgattgaaagggctaccgttacccgattattgcaactgttcttgatttaagtgaaaaaattcaagggcttcatcatagttgctaaaagataccgtgaccaagtcgagaatatcagcatctatcgggactggattttcaatgcgataaaccgctaagcctgcgtttttagcggataaaatgccgttcttagaatcttcaaaagcgacaacttcatccggtgggaaaccggatttggcgatggcctgcagatagatttcgggatcaggtttgccatgttgcgtctcgtcgccgaacaaggcgaattgaaaatagctagctaaatcgagcttttctaaaatcgcctgggtttcgtttcgataagaggaagtgaccaagccacaactgatttggtggtggccgcaagcttcgaggaaggtacgcgtacctgggatgagttcaaaattgccgtgctgaaccagcgctgttcgctgtttcaaaaaggccgaaaagagtgtatcaaacggaaatcctgtcccatagtggtgcgtgaaagtttgctgaataccgctcatgggcatgccaagaatgtgacgataaaaatcaaccgtaagatgatagccattatcggctagtaactggtcccagatggcatagtatttggcttcagagttaatcagtgtcccatccatgtcaaagagaatacatcgcacagatcaacgacctcctttttagctgaacttaacctgatcagaccgtgacaacttctgtttgcgccgtcagctgatctctaattttggcaggtaagctgttgtcagtgattaagtaatcaatatcatgccaatttgcatactgggaaagtgatgaggaactagcttttgaactgtccgctaagacgaagttcaggcgactgttttgaatgatcttgtgtttaatttcgacatcgtcaagactgtttgaacttggaccattgtgctcagcgaatccggatgtgcctaagaatgccatgtccatcctgattttttcgatgaagccgagtgtttgtgtgcccattgtcgcaaacgtcaaaggatcgaccgagccgccaacactgatgagatgattttgactggtcacgagttcattcacaacaggcatggagtttgtgatgatcgtatggccagccgtttcttttaacagacttgcaaaggtcagcgccgtgctgccagcatcaataaaaatagttgagcgctgggaaacataggacagcgcttttttgcagatggccagtttttgttcgtgaaaactggccattctttgttcaactggcggaatattgaaatcctgaacgggcatcactgcaccgtaccatttcttgacggcaccagaattgtcgagttcctgcagatcgcgccgaattgtttcgcgagatacgttgaaataagtggctaactcggtgatcttcatggttccttgatgtgagatcagatcaacgagctgtttttgtctgtcaatggcacttaattttgccatggctaatcaccttctcgctttcgattgtagcaaatacaacgcaacaacgccacgatttgttgattattaaacgtaaaatgtggcaatttaaacattttatgttgcaagatacacattagccggctatactgaacttgtcaaaaggaatatcagccttgaggaggagaattcttatgaagttgcaacttgcattagacgatatctcgcttgtagatgcgttggttctggccgaaaaagttcgagactatgtcgacatttttgaaattggctccccgtttatcatccaagaagggatgcgcgccgttcgcgaatttcggcgttattttccggaaaaaaagatcctggccgataccaagattatggatgcaggcgagtatgaagctgagcttacctttaaagctggtgcggactactgcacagttctcggtgtgacggacatcttgacgatcaaagcttgtcttgctgcggcaaagaaatatggcaagcaagtctttgttgatacgatctgtgtgcctgacttgaacacccgcatcaaggaacttgaggatgttggggttgatagcatcagtgttcatgttggcgttgatgagcaagcggtggggcaaacacctttgaatgcattgaagcaagttaaacaactgagtaagcactcacagctgtcagtcgcaggcggcattaaagtcagcacggttgaccagtatcaggcccttggcgcagatatcattattgttggcggcggggtgaatcatgccgacgatcctgtcgcaacagcgaaggctttggccgacaaaattcattcgcatgaaaatgtaagcgcttaataaggagaaatgatcatggaagcaaaaagtttgaagacaattatcagcgaactggatcaatatgcgccaatgattgatgacacccaagtcgaaactgttgccaagatggcttttcaagcaaatcggatttttgtcggcggtgctggacgctctggttttgcaggtcgcggttttgctatgcggctcatgcatttgggattgcacgcctattttgtcggggaaaccacgaccccatcaattggggaaggcgacctacttgtgatcggttctggttccggatcgacaggcagcttggtggttgatgctaagaaggcaaaagcggtgggcgctaaattggcaacggtgacgatttatccaacagccgaaatcggcagtctggccgatgcgatcattgcgattcctggcgaaacgcctaaaaacgaaacaggggcagccgacactgctcattcggtgcaaccaatggggaccttgtttgaacagctcagttggttaacttatgacgccattattttggaattaatgaaattgactggcgagacgacggacacgatgtttcctcgtcacgctaatttggaataggccaccgtcatcatgatgataaaagcgcaaacggagcgttaagaaagagggatcattatggacctgaaggtagcgcaagcgaaagtccagaaatttggagcaacacttagcgcaatggttatgccaaatattggtgtgttcattggctggggattattaactgcactatttattccaacagggtggatgccgaataaacatttgaatgaattggtcggacccattctgacttacttgcttcctgcactaattggttacacggcgggggccaacatttatggacgtcgaggcggggtcattggagcttttgcaacccttggcgtcatcgtcggctcgagtgtcacgatgctggttggtggcatgattatgggcccaatcggcgcaatcttattgaaaaagtttgataagctggttaaaggcaaagttaaacccggcatggaaatgttggtggacaacttctcgctgggtattcttggctttattcttgtcattttaggtttcttggcaattgcccctattattacgggcattcagaacttcttgtctgctggcgttaatttcatgaccaaacgtgatttgattcctttaaccagtttgtttgtgcagccagcgcagattttattcttaaataatgcgattaatcatggcatcatggtgccacttggactgcaacaagcagccgaagcgggtaagtcaatcttgttcctagttgaagctaatggcgcaatttgggttgggacagccttagcatttgcaaagtttgggacaggtattgcgaagaaaacggctcctggggcagcggttatcatgttctttggtggtattgctgaagttgtttttccttattgcctaatgatgccgctgactattcttggcccgatggctggtaatatcttttcactaaccgtcctttcactttttggtggtggcacagttggaccgccatctccgggatcggtgttcgccttttacatgatgacgcctaagagcagccttctggttaattccattgcttactttggcgcattggcggtttcgtttgcagtgacgggactaatcctcaagtttgttcggcagccaaatgctagtaagatgctttcaagctttgacacggctgctgtagctactgcaggccctgccgcgccagctgtttctgaggaacttcaaacagctgaaaaagatgatggcattgcggtagcacccaagaatcagttgcgccacctaaatcggattatttttgcttgtgatgctggtatgggttcatcagcaatgggggcctcaatattaagtgccgaactcaagaaagtcggcctgtcaccagaagtggaccatatggcggttgcagatattggcgatgaaaccagtagagcagatctgattgttactaatgaaagtttagagccgcgggcagaaatgatgagtaaaggcagtctgccaattttaacggttaaaaattttatggatcgaacagaatatcaacgcatcattgatcagataagaacgatggtgggtgacactgaggatcatgtaacgcaaaaacaagcagccgaagaaacggcaataacgccacaagttgccgagcaagtgcttgaaaaaccactgtttccagttgaaaacattgttttaggggcaagtttccaagataagaatgcggccatttcagcgtgtgctgatatcctgatcgaaggtggctatgtgaagccgttttacaagcaggagatgtttgctcgtgaggaagatttatcagtttatcttggcgatggagttgctatgccacatgggttaacccagtcggattccattttgcattcaggaatctgttttgtgcaggttccagatggtgttgacttcgatggcaacacggcataccttctagttggcgtcgccggcaagggagaggaacatgttcagctccttggtcaaatcgcgcaggcattgacggaggataacaatatccaaaaacttcgagaggccaaggacaagcaaacggtcctcagcattttgaaacttagtgagcactaacaagttatcttttgagaggatggagattatggcaaccgcagtccattttggcgcaggaaaaatagggttagggttcattggagatttgcttcatcaaagcggctatcacattgtctttgcagatgttgttgagaagacagtggcacagttgaggaaagagaaacagtatcgactttttctaattgatcacgattatcaagaacggataatcgacaatgtggatgctgtttcttccattcaagatcctactggtgtcgttgaggcgataacacatgctgacatagtgaccacatccgtcatggcaagtaacttaccaaaagttgcgccacttatcgcgaagggtttgaaggcgcggttagaaaaacatctgcctaaaatgacggttatggcttgtgagaatgccattatgggcacagatattctaaaaaaggcgatgcttgattcaggcgagatgaccagtgagcagcttgaacaagcagcggtttatccaaatacggctgttgatcgcgttgtatttgatggtcatcatcaggggcaagatggtattgaagtaggtgacgcgtatgaactggcgatcgaaagagaaaagctgttagatcctaatagcgaaccaattaaaggcgcagaatacgttgataatttggaaatgtacctgcaacgtaagatttatatcattaactgtggtcatgcgatcagtgcttatctgggtcaagttcacggctatcacacggttcaagaagtcttacacaacgagagactattgtaccaagtgaaggcggctatggcagaatcggtagcagcccttgaggcgaagtatcatttttcgaaacagtcactgcaagattatattgagacgatgttcgttaagcggatgacgacacctggcttatctgatccggtgacgcgtgttggccgagaaccgatccgcaagctttctcccaatgaccggatcattggtcctgcgaatgaatgcgagtcttttggcttagataaccagtatttattacgcggagccgcctgtgccttacttttccataatcctgatgatgagcaagcagtcgaaatccaacagtttattaaaacgcatggaattgaaaaagctattactcaatatacgaagattcaacctaatagtgcgatgtttgaaaagttgctgaaggcgtattgggaagcgaaggcgaagttgcctgccaatgttggcaatgccaaataggatttctttgattcgcaacttgttaatgaagaccgacaacttaaaaatgcctgcaatagaggattctctgttggaggcatttttatatggtgtctggatttgatcccaagatattaggattgaatttcgaacatatacttaatactgtttgtaaagactaaggatatgcacagcaacaatacatcaaacaacaacgaattagccgaaaacttttttgtgaaacttgaaactttatttatgctgacccagtctcctgaacagcagcaattgtctcagcattaataaatccgagatccggttccggcacctgatcaaaaacagcatgtgcaaatgctgccagtttctcgctgtaaggcagtgaaacaccgagaacttcgcctagcttaaccagtggatcgatgccaaatggtaaatcctcgacgatgaaccgtgattgcaagctgtctggagcgggcaggtcacggtaggtaggtagtccatgaaacacctctcgtagcgtgtcaaagtctgttccccattgtgtggcaagttgatgcacaatgctgctgtatggtatgtgcaaggcacttgctaggtgtttgcgttcgtcgtcaatgtgcatgatgtaagctcttgcggcggaacttaaaccgtctgtgaggatgtgaaaagacgcggcgtgttcgatgcgagaaagattgaagagggagacgggtacgtgaatgattgggttaagcgcacttagacttgcctgcagaatattaggcgactcgatcacttgagcatataactgcttgagcaaattaatgcctttgatgctggcttctttggcgccataagtcgaaaccgttactttagccttgatttcgctgatgtgcaatgaatggtcctgccattgagcaacgtaaggcatgcctgatgtttccaaaatactgacgcttttttcggcgagccatgctggtgtgaaggccgcaacagcttgaagcagatcccaattaccattgagaaaaataatggcttgacctcgatgaatgagcggtcgcaaggcatcaataacggtggtgtgtacgttggcccaagtggcaacgatgatgacgtcggctgattgaatgctggcggctaggtcagagctgacgtttaaaggctgggtagttgtgaagcggcctgtgatggcgaagggggtttcagttagcttggcggctttggcaggatcgcgtgagtaaaccgttgtcgtgatatgatggcgaacaagatctgctgcacaagcaaaaccggtattgccggcaccaataatcgttgctttcatgcctccgcctcctttgccgcattcaggaacgcaactgtttccggttgggctgggtgtgtaaagaattggtcggcaggcgcgacttcgaccagatggccttcatttagaaaagcgcattgcgttgcgatccgttgggcaaaatccagttgatgcgttacaacaatcatcgtctggcctttttcgcgcaacgaaagaatgtcacgactgatcgtaccgaccaaggccggatctagtgaactagtgggttcatcgaaaaggatgattgatggtcgtaaggcctctgctcgggcaatgccaatgcgttgctgttgaccaccagataattctgtaggatataagtttgctttgtcagttagttctaattgctcaagcaaggtttgagcggtcttttgcgcttcggcttttgtttgatgctggccgtagattaaaggctcggtgatattttccaaagcggttttgttattgaataaggcgtagttttgaaaaaccatagcgagttgatcacggattgtccggatatcgcctgctgtgagccgactgtaatcgtaagtgttgtttcccagtgtgagattgccgctggtcggccgttctagcaggttcaggcatcgtagaagggttgttttgcctgcaccacttttgcctataatgactaaggtttctccggcattaacggtcagattaaggttggcgagaattgtcttccctttgaatgttttggtgagatttttaacttctaacaagcccatcaaaatcacctacttttcttgagcgtaagacttggtcacgtcagtcacacgatcattttttgcagtaaagggatcactaccaagccacttttgggacaatttggccaaggtgccatttttccgcagtttgaggagttctttgtcaatatccttacgtagttgtgtgctggttgaactcttgtgatagtaatagaccactgggaagactgcgattgacttagaaagcttgagcggttcgttgagcttcttctgtgcagtatcaaaatttgtccgtgggtaaagaatggcatcatattgtttgttcacaatatctttgaactggttagctgtatcaacgaaaccggatgatttgagtgttactttctgttcgggatgctgcttattccagttttcaacgataccataccgcggatcagcaacatcaatcggttccaacttaccatttgttttcgccagcgatgcaaggtcagtgattttgttatcatcttttcgtacaaccaagcgcaagtcactcagtagggtagggttgcgtgagtagtcgtaggttttagcacgttcagtcgagtagtagtaattgcccactgccagatcgtatttaccagattgtaagcccacaaagacggagtttgcttcagtgacttgatactggaacttatatttgtttttgaggtctttttgaatagcggcaagaatatcgccattatagccggacagtttatctttactcttataaatttggtagggttgagatgctgacgggccaacgatttgaactgtcttaacttttgaactgctggtcgaactggcggtgccggatttgccacaggaggcgaggaataatgcgagaacggcggtgccagcaatgagtgcaagacgagattttttcatgataagaactccttttagtgtaagtatgtgacttgacgcttgatgagatgaaagatagcgctgacgagccaataaagaactaggtaaattgtccaagctgctaggtaggctggaatgaattggtacgttttggagccaacaaggatgctagtgccagtgatctccagcaggccgatgttgtaaataatggccgtgcctttgacaatgtccatgacactattgaaaacatttggcagggcaagcgcggccgcttgtggtaggacaatgcgtttcatcgccgtgcgcttactcagtcctgaggcgagtgctgcttccagttgcgccgggtcgagtgcttgataggcgcgcggaaagtttcaccaaagtaggcgctggagaatagtgcgagagcagcgacagcaaccacagtggcgggaatatgcagtcccttaccgccatttagcacagtcgtaaggttcggtaatgcaaagtacagaatataaaggacaacgatcatcggcacactgcgagcaaacgagagatagatgccgaccaattgattgaggattggcggccgtttgacacggatccaagcgatgaggcaaccaatcgggatcccaaaaagaattgccaacagtgcgatgtaaatgcttgtccaaacacttgggatgatttgttgccaatcttgccagaaaatcgtcattttgcacctcctgaccaagaccagcggcgttcaagctgggtgaaaaatgcttggatagctgcacatattgcccagtagatgagtgacaaggcaatgaaaacgaccacttgctgtttgccaaatgatgcttgggcgataatttgggcttgctcatataggtcggtgatgccgatgacatagacgtaggctgagtttttgacaattgtgataagcgtattcccgatatttggtagtgcggccgcaaaaacctgcggacctaaaattctgcgaatggctgcgatgcgactgaaatgcaacgatgtacaggcatcatattgtgactgtggaagcgaggcataagcactacgcaggttttcagagaagtacgcactgttttccaatccgatagcaagaatggcgaaactggttttggcccaccacgaaatgtcaatgccgactaactggaatagaagtggcatgccgtagaataccagcattaatagcaataaaactggtgttgcccgcatgagactgacgaacccgttataaagcaattccagaacgcgcgaatggctgaaatgcaccaacgagattaatgcgccgaatacaagtacgaaaagtgctgatgcgccaatgatccaaaatgtgatgcctaagtatggtgctaaatgctgcaaaacttcgaacaatgttgcaaaccccaccgctaccaactcctttgcctgtttaatcaaaaaaagatcttcgcccctgtatgtttaatacagggacgaagaccttcgtggtaccaccctaattcttggctgggattgctcccgccaactcaacaacaccgtcaaaacgatgtctgggacggtatcgagtcctgacgcggcgcccgctttcacggttgccgatgctcagagctcatcttcagtgcttcaccgttccaccctcacacctccgggcagtctctttaaacggattcacgcttactcttctcttcaacgcataagtcaatatgatgttttgattagttgacaatgagtatatggtgtgtcgattagaaagtcaatggattagtatgagcaatatttatttttgattgctgaagatcttattttcattgaaaaagtcgtccttttttggcggttaatcccactcagcatgcatcgtctcagtcattcgccaataaacaatcagactaataagcgcacatagcgaaacataaatgaagaagtaactttcgtgatgtgcttgcttgaaccatagtgcgatgtactcagttgttccgccaaacaaggcgacggtcaggccgtacggaaaaccaacaccgagtgcacgaatttcggttggaaataactccgctttcacaatcgcattgatggatgtatagccagtgacaagaatgaggccgactaacattagcaggaatgccatcaatggggttttggtggtttgcatcagccaaaatagtgggaccgtcaagaccgtgctgccgatcccgaaaaagaagagcaaggggcgtcggccgatgtgatcggatatgtaacccgccaaaggttgaaggcacatgaagatgaagagggcggcgaagttgattaacgccacggttcctttgggcaagccaaccgaattgatcatgaatttttgcatgtaagttgtgtaagtatagaagcagatagtgccgccgagcgtcaggccaaccacggtcaggatttgcttgggatacttaagtaaggcgcgtatcgtgccagctgattggcgttgactggtggacatgtgctgaaactggtttgactcgtccatcgatagtcgcagccagagaacgagtagagcaccggctgcaccgatggcaaatgggatgcgccaaccccagaagctgagttctgtttcagtcaggtacatctgcaggataatctgaaccccaagtgcgatcaattggccgctgactaaggtgacgtattgaaaacttgaataaaagccgcggcgtgaaggctcggccatttctgacaggtaagtagcgcttgtcccgtattcaccgccaagcgacaggccttgaaacagccgaatgaccactaacaaaacaggtgcccaaataccaactgtctgataatttggcaataaggcaattaacagcgacccgctggccatgatcaggatggataaggtcaacccggcccggcgcccgtggcgatcagcataccggcccatcacaaggctaccaatcggccgcatcagaaatccaagtgcgaatactgctgcagcatccaacagttcactcgttggatcatgacttggaaaaaacgaggggctgaagtagacagcaaacgcggcgtaaacgtaccagtcgtaccactcaatcatattgccgagcgatcctttaaaaatattggatgcgatcttgcgcgaaggctgcatggccaatccccctatgatgtgaagttgccggacaagctatttttactaatggaaaaaatgtacgcttttttcaaatgtttatctatctcttatgtaacattaattaacaactgtgaaatttcgtggttttcaggctgacttgacgatcaatacgatattggtggatgcgcgataggacgattttggccgatcgcgttttttgatgtttttttcctccgcaattatcgtgtcgcgcgctaatggttaagcgatcttttgggaattctgcgctagtgcagacatatcgctttgattggtcagcgttttggttacttgattgcgatcacgacaactaactcgctgcccgcataaactaaacccatcgatatcgaaagacactaggcgccggatgggattaggagatggcacaggaggaggcaggatttgcattgtatctcgcacatcaaggggtggtgtatgcagctttggcgcagttggggattcggcgtgatcgaagtgattttcaggattggcgtgatgatgggatgttggtgtacctcaactacttcaaccgatatcgcgatccattgacggatgaggctgccattcgcaagtttaataagctggcatggcattttgtttatctgacgttgatgcagcgaatgcagaaaaaccggcagcgaagcgtgattgagcggttgccaagcaatatcactttattgcagaaaacgacttttgccagcactgttttgaatgtgcagacatcgctggaatgggatggtcagctgcaacgactcgcggctattttgacacctatggagcgaacagttttgggcttgcgattggctgacttgtcagatgctggcatcgcaggtcgattacagattagtcggcaacgagttttgaagatacgtaagcagttgcaggccaagtatcggcaggtggtcggataatggtcgtgcgtattcggtgagcagtgactaacgcgctctcagttgcaaaaacctgcacataaggacctcggccacaatgaccaaagagcggtcatgatgcccaaggccgcatacaagccggctactaagcgcgctgaagactgctcacttttaggaggaatgaaaaaatggataaggaattattgacgtatgtcttagatcaggcggttggcgttgtgattgccgtgtttttactgacgcggatcgagcggcggttggatgtcctgattacgagtattgagaaattcatgacaaagttggatgcaaaggacaagttgtaggaggccgggatggtgatattaatggcagatgtgagtagctggcagccggaatcggacagctggtttcgcaagctggcggatgttggggtgaaggcggtggtggtaaagctgacggaaggcaccacctaccgcaatcctaaggccgcagcgcaattggcggcaggtcggcgaatggggatgcaggtgcatggttatcattacgcgcattatcacaacagcgctgatgccgtggcggaaggacggttcttcggaaccacagccaaggctttaggtttgtcaaccgagtcggtaatggcagcagatgtggaggatccgggtttatctggtgagttgacgggggtgacgaatgtttttctccaaactgtcaaagcgatcggatatcctcacacggatctatataccatggccagttggctgaccgcgcggcgctttgatcgggttgccttgattccgaaaaatctgtggcttgccagttacggcgtgaatcaaccgggcgttgataatgtcggcacatggcagttcacgaataactttcaggggctaggtgttgatatgagttacgacttttttggtcactatacgacgcgtctcactggcacactcaacggtggtgtcgcgcgcgtgccaacgattcggtttcataccgtgcagccaggggagagctggtgggcgattgcgcaccagtacggacatgacatggacaagctggctgcattgaatggcaagacgattttgagtgtgattcaccctggggatcagctgcgggtggaataaggtttgaagtgaaaacgagagttgtctttcggctacttgcagaaggacaactctttttgtggtatgaatgtcccataaagacttctgttaacatatctaaagtctaatgacgaatacaattacggagagcaaagtcgggtataagaaatgccaaaaaataacaaatttttataacgatctttaatgcttattaaaacgttcagtcagttgaaatttactcatgaatttaacgagaaacttttaatttagacgatgagtggtagtggctaactgtgagtataaatgaacgatgttttttaatgcgatttcctctcatgttaatttgttatagttcgatattaaataaaagcattagacagtaggagatagagtacttatgctgaagataacatccagcgagctaggacctcatagtcatgtgcttgagaaataataccgcggttgtttccttgatgctgattcaacggaagctgagtgtttttggtcaaatctttagtagacgaaacaaaactaggcggatagcaaaggagaacgcttatgataaaagacaaagttgttgtgattacaggtgcatctagtggtatcggtgctgaaactgctaaattgctcgcgagtcgaggagccaaggttgttcttggtgctcgccgtaaagagaagttagaaaaactgactgatgaaattagaaatcaagggggccaatcaatttatcaagtaaccgatgttgtcaaaccagaggacagtaaaaatcttgttcagcttgctaaaaaaaacattcggtgatattgatgtgatgtttcttaatgctggcttaatgcccagttcaccactttccgctctaaaaacaaatgagtggaatcaaattgtcgatgttaacttaaagggcgttttgaacgggattgcagcagccctaccattttttaaagcgcaacgatcgggacactttactgcaacgagttcagtagccggtcttaaagcctacccagataatgcggtttacggggcaacaaagtgggcagtgcgtgagcttatggaagtgttacgaatggaatcggcacaagaaggcagtcatatccggactgccactatctatccagcggccattaaaactgagttgttaaatacgattactgacgaagctagtgcccaagagctgaagaaaacttacgatacttacgaaattacgcctgatcgaattgctaaggttgttgaatttgcaattgatatgcccgaagacacaaacgttagtgagcttacagtgggacctacaattcaaccttggtagtatcatagatgactttcccccttaaaaacggctttgagtatttttaacagcagatccgtatttgtcttgcttggtatggttggcagaagtgcaaaatggagtgtcgattttcatgaagaaaatattatttgtgattttattgctagttgcggtcgaattgacgggttgtggtaatcaaaggggaaagatttctaatggcaagtcttccgagatgccttcaacaaaagcagtgaagaaaatgacgagtaacaataattttggtcgatcattagtcgtgtattattcgttaacatcgcacacaaaacaggttgcagagtcgattcatcaccgcgttggtggtgatattgtggcaattcagacctcaattttcaagtcaagtgcaacgatgataacgaattcttgatagtggtctaggctgttacgccatgcatcggtagtaatcgcatgggcgaagatagttcagaatacgtctgggacgatggttcagtgcggattggactgcttgaatttcaaccagggtaattgctctgagagacttccctttcgggaagaattccctaagcagtccattggcgttctcgtttgtgccacgctcccaaggcgagtacggatgtgcgaagtaaatctgggttccaacaatctctgataacttggcaaactcggaaccattgtcaaaagtgatactctcaaattccttggccccgtagtcgtcgatcgtgtcctgcaaggctttaaggcaggtgcccgcatgatagtcaggaatcttgacgatgatctcagtccggctgtaccgttctgtgagcgtcattaatgctggctcatcagctaagcgaatacctttgaccaagtcgccttcccaatgtcccacgcctgtgcggtcattcacggccgcaggacgcaactcgattgagtcgccgtatatcttcttattcttgcgcttgtgggcgttcttatagcctttgatgcggcgtcggagcttcttgggaagtgtcatgttgtctagctcaagcagcccggcgtcgatgtagcgatagacagttgtcgttgaagggcaagccttgccctggtcgcgatagaagtgtacgaagctatcaacgctgtgtacgcgcggcttacgagtaagctccctggcgagagccttgaagaacgcacggccggtcttaagaaaggcgtagtgaccggttctatcgcgtttacggtcgtgcatggcttgggcagtttccgcaagatagacttgatgcgagtgacgcttcgagtcgagctgagttacagatccacgcgtgatttctcgtgagattgtcgctttactgcgatgaagcttctgtgcaatcacggtcgcggtgtcaccagcagcctgaagggcctgaattgtagcacggtcgctaaaactgagttgttggtaatgcttgtgggtgttagtctgagagtgggtcatgaagattcctgctttcttgtttagctagcactaacaagaataggtcttcatggcctttatggtctagtcgtcagggtgttgcacttgaattgtaaactggggtgtggcaattcagacagaaaaatcatatccaacgacctattcagcaacaaccgctgaggtgaaaaaggagattaggcaaaaccaattaccccaattgaagacagctgacattgattggcatcaatataaaaccattttcgttgggtcaccagtgtggtacggaaacttgtctttgcccatgcaacagcttttccgccaacaccagtttcaatcagggatacacatagcgccattttttacaagcgggagcagctcgccgaaagaggcattcaccacaatgaagcgattgcaggcacagccaagttatcatcagccattgggaatcacaaatgatgaacaatctgatcgcaacagattagtggatcaatggctaaaaggtattaagttcgattaaagagagaacgagcaagcatatactattggtgtacaaagttcctttgcatcggacacagaaaaataaagcagaaaccgcctattggttcaaagaggcggtttttttgctggctatttgatttagaagttaaaaataaccatttcaataaaaattcacaaaaagattgtgcaaaatatgttgacacggtgtcactttccgtataaactacgaattatcaattagtgacaccgtgtcaccacagggggcaatcatggcatctactacttttcaacatctcgatgcagctaaacaacaacgggtcttagcagcactcatcacagaattttctcaatatccgttggcacaggcgcaggtggcgcgcatcgtgaagcaggctgacattgcccgcggtgctttttataagtacttcacggatctagatgacgcctatcgctatgcttttggacaggtgatcgggcggttgcatgcgggtatcacgggtccgaccatgcggcaagatccatatacggcaacagctgattttctgcatgaggctagtgagagtcgtgaccgggatttcatccgcttgcatttcactaaaaatagcgggttggtaaatgttgcccggccacaagttcccgcagatgcaaccgactgggctgttgcggcgttatgccacagtgcgatttccgaggtgctggctgatccggctgacgcgaccttgattttggcacatttgaaggcagcactttctcagctgcaagttaaggagtgaaacaatgtatctttcattaaaagaaatctggcatgaaaaattacgctatggcttgatcatcggtatgattttgctggtgacttaccttgtatttattctcagtgcgttggctaatgggcttgctcagcagaatacgcaagcaatcgagtcttgggacacatcgaaggtggtattggcaaaggactcggatatcaatttgagccagtcgctgctgacgtcggagcagacaaaagcgattaagctaggtaagtcgcaagcctatgtcggtacaatcggcgcggttgcgaccagcagcaagcactcggaaattcgttcaacgatggtcgggcttgattggaatcagtacatcggcaaggacatgcagctggtgagcggtcatcgcgtgcaaagtgacaatcaaattgtcgtggatacacaatttaaaaatgaaggctacaagcttggcgacaaggtgcggttaaccacaaacggccagcaatataccatcgtcggtttcacggaaaatgccaaaatgagtgtcgccccggttgtctacggcaccatggcgacatggcgaaaactgcacaacttgccggatacttttacggctagcggcattatttccaagtcggctgattttaaagttaacaacagcgatttgaaaacctatacagcggatacatttatccagaaactgccgggttattcagcccaaaatagcacgtttgcgttcatgattggttttctatttgtgatttcgctgattgtcatcgcggtcttcctgtacattttgaccatgcagaagattcctaactacgccgttttacgggcacaaggtgtaccggcgcggaccctcgttaaaacgaccattgcgcaagcactcatgcttgtgtcattcggtctgatcctcggtggggtgctgacggcagttacagcgcggttcatgcctctgggtgtgccgatgattttctccgccggtttaagcatcgcagttgttattggcattttgctcaccggcttactcggtgcaattgtcccagtccggacgattcttaaagttgatcctgtcacagccattggaggttgattgtatgtcagctatcgaattacaacacatcattaaaaattttaaaacgccaaccagcgatgtcgaagtcctcaaagatgttagcttcagtgccgaacccggcagtctttcgctggtgcttgggccgtctggttcaggaaaaagtacgtttttgaccattgcaggtggcattcaaaccccaacatcaggggtcgtgacaaccgctggacaggagcttgataagttatccggcaaggcgcgtgatgcattgcggttggataagatcggatttgttcttcagtcatacaacctcgtcccatatttgacggttggcgagcagttcactttagtcgacaagattaagccaaagaacaacctcagtcatgaggaacttgatcaattgctggatgatctcggtattggtgacctagttaatcaatatccggcttccttatccggcggccaaacacaacgggtggccattgcacgagccttgtatcccgatccagccatcgtgttggccgacgaaccaaccgccgcattggatagtccgcgtgtggcagttgtcggacagctgctagctgatctggcacataagcgtgataaggcaattgtggttgtcacccatgatgttcgcttagaaaagtttgcggatcgcacgtttactttgttggatggtcagttaagcgaaggtgacacttccaacgcagcatagtgaaaaaacaaccgtttgcttcgggatgattaacgtggtagatgcttaaagagtcctctaatgtcagaattctgacattagaggactctttttttccgttgaactttgcaaatcactgagtaacaattgataaacgaatttcttttccaagccctctcgcgtatcgattgagtgttgccagagtcggaagagagtctaagcgctcaatctttgctagttgcggctgtttcataccaattttttctgcaaagtccttttgagagattccttgcttgattcgttcactttctaaatcggccaaggttttgatgattgccaacttttctggattgtccttcttcagtttctgactgaagtcttcccatgtcgtcatcaattttcttcctttctagagagccaatcttcgaggttagactgtgcccgtaaaatttctctgtgatcagttttgtttgttttcttggtgtagtgatgaagcaaaacgaaatgatccttttgccatgcagcataaaagattctttcttgcatgggacgcaattccatgatcggataagcatatcccttcagaaacttcgcgtgaggttcacgtaagcgcggaccaagattttgcagcatgtagagttcctttgtgattttgtttaaaaggctcacattatttttttgatgactatggcgtaactgatcaagaaagtcttcgatctcagagtagccatcgcgatcctcatagaagtcaattttatacatctcatcccccagaattaacttgcttgctatattaattatagcatgtttgcaatattagctcaattggtcatgtgtggtgtcctttaaaaaataaatttagaaggcaacaactttcaaaacgtctagcataaacttgtttgtggcttataagtaaatctccttacaaagttaaaaagaccaagaatgcgcaatctcattgatttccgctcttggtctttttgggaagcttaatcgtttatctggctgattgaaatgaagacatcatttgcctaatgtctttttaaaagtaattagaatcgcggttcgcctaaagcgtgttgcgcagccaagttcagcaagttccattgacgatcaaaacttggctggaagaagaagtcggcttcagccaagtcttcaaggcttaattgttgttgaacggcgagtgccaagacgttgccttgtgcagtcacgtcgtaagtggacaatactgcaccgcctaacagtcgatgagtttgcgggtcaaagactaagttgacgcaaacttgtggattgccgttagcttctggcacatagtctggccgcagtgaatcggtgtagaaagcggtatgcacgttaacgtcagcccgtttagctgtgaaggtgttcaggccgctagctgcaaaatggtagtcgaaaacgctcaacgcactggaaccaacgacgcccttgaatggccgtgctggattttctgcaaaaatgttttcggcaaggtaacgggcttcacgccgcgcaacggttgccaaggcaatcggtaccttttgttgtgctgggattgagtaaaccaaagtggcatcaccgatagcataaacgtctggcaaattggtccgcagataaggatcggtgttgatgaagccgcgtttatcaaggttaacggtgcccttgagccattccgttgctggcttgatacccgctgcttgaatcacgagatcggttttaacgtcaccggcatccgttttgacggcgctaacagcttcatcgcctgtgaaggcttcgatcttgacaccaagcttgagctcaacacctttatcagtgagttccttggccagaatgtcggtcatttctggatccagataggtacccagtgggcgatcaatcatatccaacaacgttacttgtttaccagctttacgactggcttcagccgcttcaatcccgatataaccggcaccgatgatggtgacgtgcttaaccgccggatcttctaacttggccttgatgttggtggcccaatcgtagccacgcatcaagaagacattcttcaaatcgttacctggtactggtaaggaattcgggcgaacgcctgaactcagaattaatttgtcataaggataatcctgcgtcgtgccgttcttcgtgtcgcgaacggtgacggatttcacatcagcattgattgccgtcacttcatggttgtttaacacatgtgcgccgcgcttgatcaaatcgtctggacgaaaattccgaacatcattcacatcggttacttgattttctaagaatagttccatcccgcaggacatgaacgaaacaaaatcacctgcttcaaacatcgtaatgtctgcatctggataacgatgcaacagttctaagacgctttggtgaccgccgtgtgatgcccctacaacaatgatctttggcttgtccacaaaaattcctcctaattatgtagtaaccgcgacttttcgtcatcggctctatctctatattagaatagttccaatctatagtcaatgatagacgacaattaattattgaacaatttatttttagagacggctaactttatgcagatgagctttggccacgacgctgcctaacagggatcgtggcaactatcatgttcaaaaaggtggcatcgcgcacgtttttttgtagaacatttttacccagtcaaaagcaatctcgttgatggttcacaaagacatgaaaaaagccgctgcactaagattcaatatctcagttgcagcgaccattcatttgcttattgaaatctcatggcatcctgacggttagataatcgcgaagtgcttaagtgccttcaccacgccatcttcatcattgcttgctgtaataaaatcagcacgttttttgacaatgtcctggccgttagccatagcaacacttgtcccggcgaaatcgaacatatcgaggtcgttatgttcatcgccaaacgcaatgacatcgtctgctgaaaatccgaggtgttgggtgagttgcgctagaccccagcccttatcgacgccatggggcatgatttccagcataaatggcatactgcgaatgacggtaaaacgattgccaaattcagtttcggcttggggttgaatcgcggcaagcttatctggttcgcccagtagcatgccctttgcaatcacgaagtcttctggcatttcttgcggttcacggaccttaataccggccgtattttcccatgcttgtaaaacggtgtaacgactgatattgcgatctgccgtataaacctctccggctggcgtcaagacgttgctgtcaatgccgttgctagcgaccgaagccgcaaaagtcgaaaagtcttgataatcctgatgattcagaaacttttcagcaatgattttgccgctcgcgctctgcaccacaccgccgccttgaacaataacgtattgatcgtcaccttccagtcccaacgcctccagtgtcgcatggacaccaggcaagggccggccggtacacggcacaaccttgataccggcagcaatcgccgtcttcaaaccgctaattgtagcgggtgacagctgcttatgtgaatttaataatgtgtcatccaaatcaaccgcaatcaaacggtacatggcagtcacaccccttcctcatgccagcttagcacagcggggtgggaggggacaatgtgggaaataaacggtgagaaatggccaataaacgctgctggtaatggccggacataaaaacgacttccttagcaaaggaagtcgcttccgttcgactgaccttcaataacgcggatgaccactccgcagtgatcatcgaatgataatttgtgctttactccaagcacatagtaacatgaaagattgtcgtcttgccaattgttgttggttgtcaaaagaaggcgccttaactttggtcgacagtagaccaaaataacgttaaatgtccccatgacgccccacgtccagcaaccgtaccttcaaatcttctacccgatagatcagcaaccagctgcctttaatgaacaaagcgcgatcaggtttgcgacttttgatgacatgatcgtcgtatttttccggcagcgggtcgccggttttcaagtagttggtgacttgttcaaagtcgttctgagtaaagcggccagcttggaggagttgcttgaggtgctttttgaagcgtgattgttgtgtgagttggtagtggggcatgatgaacctgcctttcttgttttcttaagcgtaccgcaatgaacaacaatggaaaaatatttttatcgaagacagtggtgacttgtgaaggattggttaacggcatgtcacacttttaaaaagaaattcacaaaattgatttggcttgtttttgaaatcgataccaaaaaagcgttgacaagaaatctgaaagcgctatattattcatgtaatcaaggagatgtggaggagcggtgaaaaatggcaacgatttcagaagtggcaaagttagccggggtttcggtttcaacggtatcacggatcattaaccacaaaccacatgtttcaccgcgcaaagcggccctggttgccgatgccatggcgaagttgggttacacaccgcttcaagctgctcgacaaatgcgcggttctggctcgcagacgattgccgtgacggttccttacattacgaacccgtttttttcagaactcgttgcagcgattgaacgcactgctgatgagcgatcctataagacagtcattgtgcaaacattcggtcagaaaagtcacgaactgaatgccttggaatttctcaagacgaaccaggtcgatgctgtgattatgtgcgcaattgagaatgactgggatttgattaagcagtatcggcaatacggtttgattggtatttgtaatgaatacgttgccgatcctgaggttttgatggtgcgtgccgatcaggaaggcggtatgtatgcgggtactaaatatctcttgaatcgtggttatcgcaagctagcattttgcactgggcagcaagctattcgatacaatgacaaacttgaagatttgaatagtgatcgttatcgtggctatcttcgggcattgcgagaattcgacttggagccagcggtggaatggcagtttactgatgttggaaccattgctgatggtcaagatgttcttcagcgcatcatggtcatgaagcatcgtcctgatgctgtgatcgccggctcggatcaagcagccgctggcatgattgctgaagcgcagaccatgcaattgaaggtgcctgaagagcttgctgttcttggctttgatgatcaaccgctgagtcaggtggttgcgcggccgttaacaaccattcatcaaccagtacatgagatcggtgatcgtattgctaatatggtcgctgatgacttggaagaaaaaacggttgaagccagacaagtcgttttaccgctttctgttgttgttcgtcagtcggtttaatcttttttgagcaaaattggtatcaataccaaaaatatggaggaaattaatatgacagtcgtattagcacgagtagatcaacgtttagttcatggcatcgttgtcaatcaatgggctgctgaggtgcagccgaagcgctatatggttattgatgatgctgttagtcaggatgaagacgtgaaagctagcatgcggttgagcaaaccagccggcacagggatgtccatcatcgacactgaaaaagctttgacgaattttaaagctggtaagtatgacgcccaacgggtattcgttatcgcaaaggagcccagcaccatgttgaaattgttggacgctggcatcgaaattccgcgtgtcgatatcggtatcatttttgcagaagacggacggacacagatcagcaaatttgtttccgttaatcaacaagaagttgctgattttaaagaactcgaaaagcgcggcgtccctgtgaacattcgctatgtacccgctgattcacccgaaccatttgataaggccattgcaggcaaagacattaaataatcagcgagttcttggctgaagaacgcgcgaggaggaaacatcatgccacatattttgcaagatatcctgatcattttcttggcatcatacgcaacgcttgataatcaaggtatcacgattatgaactactggccggtgacggtcggactttttgccggattgattatgggtgatttaccgacagccatgaccattgccgggactttccaattaatgagtttaggggttgccggcctaggtggcgcatctgtgcctgactacggcttagctaccatcgttgggatctatttgtcagcacggacaggcgcaggattgggagccgcggttgccgttggactgccagtcggactgttgacgattcaactggatgttttaattaaaatcgtcaacaacttcattgctcacaaggcacaagcatatgcacatgccaaagaatttaataaaatgcggatgattaactggcttggaccgttgttcttcgccctcaagaactttattcccatgatcttgattgtcacagttggaccttctgccatcagtgccttgctcaagatcattcctaagtggcttacaaatggtttgacaatcgcaggtagcatgttgccagttgttggtattgggatgctgatgcattacatgcctttgaagaagtatatctgggttcttatgatcggtttcgttatgtcagcttatctgaaagtgccgattcttggcgttgcgatcattggtttggcactagcaatttacacctatcagaacctgatcagtgcttctaagaagaaggaagcggcgacagctaatggtgctgatgcttcagatgatgatgacgaaggagacgattacgatgagtgatgtacagcaaacaaccaaccagccgagtgcgacacaacctaagctgactaaaaaagaacgacacagtgccatccttcgttacatggccatgggcgtcaacaattttaactacgaaacgcagcaggggccatccgttgtttgggcattttcaaaggttctgcggaaaatttatcccgatgatgatgagtatgtcgctgctttggacaatcattttaaatacttcaatacgaccactgcaatggctggcatgatcttaggggcaacgctggccatggaagaacgtgatggcattaagtccaaagatgcggttcaggcgttgaagacatcgctgatgggcccatttgccggcgttggtgacacgatcatctggattctgttaccgacgatcatgggttctattgccggttatatggccctccaaggcaatccactaggtgcaatcatctggattctcgttgatattttgctgttctgggttcgaattaagctgtttgatatcggttatgattctggggttaagctggttacgaccatggctaaccaattgagtgctttcacagaagctgcttccgtgatggggattaccgttgtcggtacattgattgcaacggttgttaaagtttacacaccactacaattccagtttggcaaagttaagttagcgatgcagacaggtattcttgacaaaatcatgcctgccttgctgcctgccttggttgcctggatggtttacaagttgctcggttcgaaaaaatggacgcctaatcgtgtcattgtcctaattttagccattgcactcgtaggttccttctttggtattctcgggattgaaccaacaaagtaatcatgatgaaagattgaggggttgatattttgaatcagaagaatcaagtcagcggggatcattatcggtttaccgtcattacaaataagatgatccgcatggaatatcaatctgccggtcagtttgaagatgcaacgacgcaaacagtggttaatcgcgattttggcaagccggattttcaggtgacccgtgatcaagaaggttttgctgtccaaatcgagacagattcatttcacctctattatcgcggtggtgaattcaacggggccaacttgttcattgatacaaaatacaattttcagacgcactatccgcgttggcattacggtgatcccgatgtcaagaacttgcttggaacggcccgaacgttagatggcgcagatggtgctgtatcgctggattcagggattatgtccaaagacggttttactattttggatgactcaaacagtatgctgcaagccggcacatcgatcaggaatcggcctgttgaggaaattgatctttatggctttgcatacggtcacgactatcgcaaggctttgtatgattattatcagctcactggatttccgccgatggtaccacgttttgcgttaggtaattggtggagtcgcttctatccttatacgcaagaaagttaccttgcgctcatggatcgtttccaaaaagccggtattccaatagcagtcgctgtcttggatatgaactggcatgtcacagatattccgacgaagtatggcagcggttggactggatatacttggaataaaaagctgttcccagaaccagaaaaattattggcaaccttacacgcacaaggcaaacatgtcacgctcaatgtgcacccagctgctggtatccgcccttctgaagtgcaatatccagaagttgctaaggctgtcggcattgatccagcctctaagcagccagtgttgtttgatttaaacaatcgaaaatttgttcaagcctactttaacttggttcatcatccgcttgaaaaacaggggattgatttctggtggcttgattggcagcagggcgctgcacgatcacgtgcgcagattgatccattatggtcgcttaacgtgctgcattttctggatcaggtgaaagaaaagaaggatcaagcgctgatcttgtcacgctatgctggacctggcagtcaccggtatccaattgggttttctggtgattccattgccagttggcgatcattaactttccaaccgtactttacagcaacggccacgaatattggctacacctggtggagtcatgatattggcgggcatatgcacggcagctatgatcctgaattgtcactacgctggctccagttcggtgttttcagtccaattatgcggttgcacagttcggacaatccgtttatgggcaaggaaccatggcaatatgatctggaaacggataagagcatgacacatttcatgcgattgcgcgctcagcttgtcccttatctggcgacggcggatgtgttgacacatcagcaaggcatgccattgattgaacctgtttattatcgatatccagaagtaaaagaagcttatcagttcaaaaatgagtacttcttcgggtcagaaatgctggtcgtaccgatcacagcgcctagcgatgacacaacgggcttagccagtgcagaaggttatgtgccagccggtacctggaccgatttatttacccaccagcaatatactggtccggcagttgttaagttttatcgcaacaagtttcagtatccggttcttgtgcgctcaggcggcatcgtgccattagctgatgatgctatggcggccattgatgatctgcccgaagctatgaccgttacgcttttccctggcaagcaacatgcctatgtattacatgaacagacagcggctggagaagcgcaaaccaaattttcttgggatcccgtggccggtacatttgggatgaccgttactgatcctaatcacatcatacccgagaagcggacctatcaattacaaattgtgggcgttaaaaccacaatgaaaccattctcaggacgatttgatcagcgactgacacttgatttagaagccgaagatcaacaggtaattaaactgcagcatatctttgcaattctgcaacgtgctaaagttgcgtttgatctgaaaaagcagttgtggcaaagcgttaacgatatgccagcaagtagagcagcattaactgttgccagtctcgcaccggcaacactgagcgatgcacttttggagatacttttgaatgattaggcctgaaatgaccgtcctttggtcattgcggacaaggtccttaggtgcaggtttctggtctggtaaacgtggttagaggaggaagattcatgaaacgcacaatcgtattggcgtcacatcatcggctcgctgaagggttgaaagacacattggatttcattagtggcggtggtcaagacatcatgacgctggcagcgtatttggacaatcagccggttgaaaagcaagtcgatgaggttatgactgctttttcagctgatcgtgatgttgtggtactgacggatatgacggcagggagcgttaatcaaaagttcttcaaatatcgcacacgtccgcatacacatatcatcagcggcatgaatctgccacttgcacttggcgttgcgatggaaccggctgatcagtatattagcgatgctcgaattgatgcgctgattcaagaggccaaagatgcaatcgtcaatgtcaacgagattcaagttgaggaagatgacgatgatgaatgaaataccatggtggaaaaagagcgttgtctatcaggtttatccgaaaagcttcaatgatagtaacggtgatggcattggagacttaaatggtatcactgaaaaattggattatttagccgatttgggcgtagatgtgctctggctgaatccgatttaccgatcaccacaggttgataacggctacgatatttcgaattatcgcgatgttgaaccacaattagggacaatggccgattttgaacacttgttgcaggcagcacatgatcgacatctaaagattatcttggacttggttgtgaatcacacgtctgatcaacatccgtggttcaaagccgccaaatcatcagtgagcgatccgcatcacgattactacatctggaagaagccagttgacgatcatgagcctaataattggggctcaagctttggtggttcagcttgggaatacaaaaaagatctgggcgagtattacctgcatctttttgccaagcaacaaccggatctcaactgggaaaatcctaaggtacgccaagaagtttatgatctcatgcgcttttggctagataagggagttgatggcttccggatggatgtcatatcactaatttctaaagatccggcttatccagatggcccgcttatccaaggcaaggcatacggtagttattatgccggagcggcaaatggcccaaaggttcatgattacctgcaggaaatgcacgagcaagtgttgtcgcactacaatatcatgacggttggcgagacgccccatacaacggcacagcaggcacaattatacacggctgcagatcgtcacgagttggatatggtttttcattttgaccatatgcatcttgactatggccaatatggcaagttctcgacaaatcgatttaaattagttgatctcaaagaagtcttggcacgttgggagaacacattagcgcaagtcgatggctggaacagcctctactggagcaaccacgatcagccacggcctgtgacacgatttggagatgaaggtcagtatcgaattcgatcagccaaaatgctggggactgtgctgcacatgttgcagggaacgccttatatttttgagggagaagaactcggtctgaagaatgttcattttgatcaattaagcgattataacgatcttgagactaagaacatttttaaagaactcacgcaacaacatcatgaaagtcctgaagcggccatgaaggccatttatctgcattcgcgcgataatgctcgcacgccgatgccttgggacggcagtgaaaaaggtggctttaccaccgggcaaccatggctggggctgaatccagatcacaagcagattaatgcggctaaggatctggcagatagtgacggtgtttaccactattatcaacacctgattaaattacgacatgaagagccattgattaccactggtgtatttgagctacttgctcctgatgatccgaacttgtttatttacctgcgcaaaggggaacatgagaccttgctggtggcaggtaacttctcaagtgaggaacgcacatggtcagtgccggatgacttgcaagctaaggatgtggatgtgttgattcggaatagtgaaatttccgattcactagagaaaacactgacattaccaccatttggcgcagtggtgtacaagcttcaatagcaatacgagtgagttcgaattcacgaaaaatgctcatcttctagtttggcttagaagatgagcatttttgtgttatatcgtgtctttgccagaaaaattccatcaatagattttgttactggagtgtttttgacttaagctgttttattgaagcagcattaagttctagaacgcaagcttgtttatcgtttcatcttatccatatccgccaacgggctattgtacaacttagcatagaacccaccagtcgctagcagttgctcatgggtaccagattcgatgagtttgccttggtcaataacgaggattttgcttgcattgcgaatcgtggataggcggtgcgcgatcacgaagctggtgcgctgttgcatgaggcggttcatggcatgctggacatcagtttcggtgttggagtcgatggaggcggtcgcttcatcaagaacgagaacgggtgcttgggctgcgaaggcgcgggcaatgctgaggagctgccgctggccttgcgagaggcggctagcgttttcgctaagcatagtgtcgtaaccgtctggcagttggttaatgaagccgtcagcatttgcggctttggcggcagtttcgacttcggcgtcagtggcgtctggccgacccatgcgaatattttcgcgaatggttgcggtaaaaaggaacgattcttgctgaacaactgtgacgagccgccgcaaactagcaaaggtaatttgggtgacatcgtgatcatcaagggtaatgctgccgctggtgagtgggtatagatcggtgagcaggttcataatggttgttttccctgcaccagtcggaccgacaatggcgacgacttccccttgatgagcagtgaaactaatatcgtgtagcacctcggttttaccgtcataggcgaaggagacgtgatcgaacttaacattgcccgctgtgtggatctaactcgacggcattcgcggcatctttttcaggctcagcatcgacgacttggaaaacgcgttcggccgaggctaaggaaagttgcaaggtgttgatgaggttcagaatgttgttgatcggcccagtaaagttgcgcagatagatcaggaaggtgaaaatgacaccgactgtgatactggtcccaccgcgaagaatggcaagcgcaccggcaaatgtgatcagcaagtaggcaaaattattggtcatattgttgaagggaccgatgaccccagagaaaagttgtgcgcgataggctgcggcagtgtagcgggcattggtttcattgaaacggtcaatggtatcctgttgatgatcgaaaagctggaccaactgtttaccagaaacattttcttcaatttgggtgttcaagctgcccaattcttgttgctgaatcgtgaaggctttttgggtgatgcgtgctgcggttcgcgagtaaaagaaagtcgcgacagacgccagaacgacaatgccggttagtagcgggctgagtagtaacatggcaatacccataccgacaacactgataatgccggtataaagctgtacaaaagtttgcatcagtgcggtgttgatgttgtcgacatcgttggtcaatcggctcatgatatcgccgttatcatgcgtatcaaaataccgcatcggtaaacgctgcattttggcaaacaggtcgtgcctaatcgcagcactagtgcgttgtgcgactttggtggtgatacttgtttgaaaatacgtgaagatactgctcaaaaaatacattccagccaacaaaccgctgacaatgaacaattcgcgcagacggcctttggtgataaactggtcgaccacgatcccattgacccggttgccaacaatggtggccaacgttgtgaataatgtgaggccaaaaacgatcagcagcttgcggcgatccgtatcgagatagccccaaatccttcgcacggtttgtttccaatcaactaaggtgactttttcggggtgcaaattacgtggcccgcgtctgccgttgagattaatcaatgtagtcacctcccagttgggtttgaaccagttgcgcgtaaaatggcgaacttttgaccaactcggtatgcgttccgcgagccgtaatttgcccgttttgcatgacgatgatttgatcacagtccatgatgttcgggacgcgttgcgaaatgatgatggttgtacggttgcggcgagccttaaccaaggcatcttgaatctcagtgttggtttcctgatccacagcactggtagcgtcatccatgaccagaatatcaggatcggggatgatggcgcgggcaagattcagacgttgccgttgaccgccagaaaagtttttcccagcttcttcgacgggggcatcataattagtcccgacaaactcagttgccctagcgatagcaacgccgctggctaattgtgtcggcgtggcttgcggcgcgccataactcagattatgcgcgacagtgccagaaaaaagcagtgagtcctgtaaggcgaccgtgatttttttgtgtaaagccggtaaggtgatttgttggatatcggtgccaccgaccgtgatattgccttgataatgctcataaagtcgggttaataaggcgatcagcgtggttttgccagaaccagtggagccgataatgcccagccactgaccgcttggaacggtgagattgatgtcatcaaggatcggtcgactttgcgaaaaaccaaagttcacgtgctcaaactggatggtgctaccagctggggcaggtaatgtcccactggcctcagtacctgcttcttcggccaaaacggcgttgacgcgtgcactagaagtaattgcccgtgaaaaggtcgtgatgaggttaacggtattggtcatcgccgtcgtaatttgaatcatgtaattgacgaacgccatgatttcgccagtggtgatggtgcggctgatggctagattgccgccataagccagtgcagcaacgactgccagattaagtaccagcatgatcagtggcgccaaagtgaccgttgccaaaacggcgcgttgactaatcgtctgcaggttgcgattttcagtgttgaattgagtcagttggtggtcttccagtacgtacgccttgatcgttttggcgccagtcaagttttcactcataatccggttcatgacgtcaacttgtccttgcatagccgtgtaaagtggcagcgaacgtcgaacgatgacgtagatatagatggcaagaatgggtaaggcaatcaaaatgatccatgacagccgtggtgatacgataatcgacatgacaatgccgccgaacagcagcataggcgagcgaacgagtccgcgcgtcagcatgcttaccagcgtctgcatttgcgtaacatcgtttgtgatgcgggtgatgagtgtttcgggtttgagtgcttggggatcgcgatcggccagtgaaatagccagcagatgagtccgcaggttttggcccattttcaaggctgcataggaggagaaggcgttacagatagcacctaaagcgaacgcagcaatagcaatcactgccatgagaatagcggtatgccaaacataagtcatatctttcttagccaatcccacgtccacgatgctagccatcaaggtcggttgttgcaggtcaagcaatgcttcgcccatgatcgctaacggcgcgagaaaaaaacttacccgtgcgcagccgtgcatatggtcgaacaaaattttcagcatgtcagttgcctccgttttggttattgagctcattctacggctggattgaaaaagatgcatgtgatcagcttgttgaatgggtagacaaacgatgcttcggtgctttttgaagatgaagaagtttccagagaagttggaggttgaagtaggtagatagacataaataagccgccacggaaagcttgtacagctccgtgacggcttatctttcttgctcggctcgtgacgacttagttcaataaacgagctgccgttaagtagcattgttgaaccatagcgcttgctcccaccagcaacgcttttggtacgctcaaatgctatcatgtcttgctgatatgaatcaacggattagtatgtttcatatgagtgtctctttttaatatatagtggttgcttaaaaattctataattcaggcagttaagctaatatatgcattattgcggtataataaatccattggaattagctgttttcctgcattttccttgcattttttgggaacctactcggaggttatcgtatggtctatcgtcacagcccgcttcaattgtcatttgaatcctttggtgccggtttaagtaccccacttagctctaacaatgagtggatccagttggcggaggtcatgccctggaaagctctcgatgaggcataccaattggagttcaccaaaaatgcgggacgtgcggcaaaaccatttcgtttactctatggggcaatcctgatccaacaacggatgggtttaactgatcgtggggtggttgcggcaattcgtgatacacccgcacttcaatatttcatcgggttgtccgaatacaaagcggttgagccgttcaattattccagcctggcacactttcgcaaacgaattgccgatatctccgagctgattacgaatatcatgaatgatacagtacgcgccaagatcgaagcgttggtcccattcaaagtggacaccgtcatcacggacgcaaccgcagtgccagtcaaaatcaagtatcctcaagacaccgtcctcctcaaccaagcaaggctgaatcttgaggcgatggcgatcgatatggcacaccaacttggtgtgccaaacccacgcatgtacaaacgcgaggcgaagcattgttggacctcattttcacgacatccaaagcaacagcgtggtggctttcataaacaggtcaaggcccaacttcaatatgtgcgccgtgatttgcggtacatcaacgaattcatcgatcagggtgcgactctaccagatgaacaagcgattcgcttaggcgtgattcgaattctatttgaccagcaatggtacatgtatacccacaagactcaccacgttgaagaccgaattgttagtctccaacagccgtacattcgcccaattcaacgtggtaaggccaatgctaaagttgaatttggggcgaagattgactgttcgttaagtgaaggcgtagtcgacattgaacgttttgatttcaccgcattctctgagggccaagacttcgcggaaactttagaccactattacgaccttcatggacattatccggatgaagtactggccgatacgctgtaccgtaatcgggagaacctaaagctgtgtaaggatttgggtatccgaatctgcggtccgaagcttggccggcatccaaaacacgttgatgcagcgaaacggcgtgaggatactgatgccgagaatcgaagaggtaccattgaacgccggtttgcttttatgaagggcacgctggggcttgacttggtgaacactcggacagctgaatcactggccgtcaagattgacgcggccatcgtcttgagcaatgcgctgaccctgttaagggtatttgctataccaattttaattttggctaaattcgagggtgaggcctatcgaattcgctataaatttactacaagggtcgaagatatgttggcctagttcaacagccactatataacaaatggtatatatggcgtgagctaatagcaactgatagactggaaacgacaatgctacgcgacggtggctctttcttaagaaggaggtggtggctatggttttagaactgtagagatcacaaaattctttgaaaggaggagcacgatgtcgatctatgaagctttgagccttatgatcatgttcgggttgtttattctcggactgattaccttggttctgaagctgaatgatcggtgataccaaaaagccgtcacgagctagctgggtaggcttatcgtgacggcttaattttactataggccaccggttaagcagcattgttgaatcatggagtcgctggttcccgccagcggttctttttcgttacatatatattaaaccatgacaaggcctttgtaacaatctgtcaacaccatgttttgcaaaaagattttcttacacttgattgataaaggcgtggtggcttgaaaacagtccctaatcatggataaaagattatcaacagttgcccaaatacaaggtgtaagcagattgttacagctcaactgacgcagctttctacgttattcaataatcttagacttccgcgtgatatggtgcattttctcgatccacgggcgaattggttcttttaggaaaagccccagaaggaagaacgcgacgccgaatgccacgaggatgatgagatcttgccacagatttggccagtagatcccgccaacggtttcgcgcagcaagttgacggcataggtgaatggcagccatgggttaatggcttggaagaacttacccgagagtacaacggggaagttgccacctgcgccggagatggataggactaaaataatgatccccaggcccttaccgatattgccgaacagggaaatcaacatgtatagaattgagacgaagactaggcttagcaacatcgcaaacagcaaatacagcggcttgtcgacaacgtacgtcccgattaggaagagattaccgagtgcggcgatgaggccttgtagcatccccagtcctgcaaacgttaaccagcgagcggtgtacatctgtttgacggtcgcatgagccaacgattccggcagctgatattcggtaatgagaatggcgccgagcagcaaggcaccgacccaaatacataaggctaaataaaacggggcactttgcgagccataggttgggatatgatagaaactcgtttgcttgagctctaccggtttagctaaaaatccggcttctttcgtggcatcacgtctcagcagtttgatcaactgcgacagatcaatggatttctcgccttttttgattgccgttgcgcctttttgaatggcatctttcaatgttggccagtcatttttgattaaggtttgtgcatcatccagcccgctttgtagttgcggcattttttcgttggctaaagcaagcgttgatgtcaggtcactttcaacgcctggcaggtcttgattgatgaaattagttgccttggtcaatttcgttttaagacttgggaagtcattttgatataagtcagcgactgtcgtgataccactggtgatcaagttcatatgaccgttaagcagcgtattggcatcagtgagttcctgtttcaaggctggtaactgtttttgggttttaaccaaaaaagtgttggcttgtgtcagtaagtcctttgttccgctgagtaaactcggcagttccggcaatacttgatcgttgattttagtcagcgttgtggcagcatcagcaagcgcagccttgaaagcgttcagtacttgcttcacactcgtgctgagatccagatccttgagcgtattggcatcacttgcaaatttctgagcgacatcattgagtgtcgccaaacgactttgtaactcattggtacttaaatttggcacgtctttggctagatcgcttgcggccgtctgaacagcagtagcggtagtcgcaacatcacgcagtcgcgtaatggcactggccaacggttgatcgtccttaccggtcagcttgttaagactggcttgcaggcgggttaatgtatcggccagactggtggcattggctgccactttgccttggcgatcagctaaagcggttaatcgggccaccattgcctgtttgatagcggcggtatcactgctagtgtccaactgctgcaactgattttgcaaggtagttaagtcagcacttaaactagtattcgcggcggctatcaatgtcagaccagcatcgaccgcattttgaaccacatcaagtgctgtgctgacttttggcaagacttcatctttggtcgtgccaatcgccgcctgagcgtttttgccaaagtcggtcagagcaggcaaagtgccgtcaacttgattgacgacggtaatgccctgactggtgacccccacggccttcgtaaccgctgattctagttggccaaagttggtggtcactgtattaagctgcgcaccggcttgttgcacttcaggcaacttgctgcgaacatcgaccgccaactgaccggcatcggctaccattggtaaatacccgttggctgccgttaatttttgggccatttgattgacttcaggcaagtaggtggccatttcgttggcggccgccagtttttctcggatggccggcattttactctgcaaaaccccgacttccgcgatgtatttttcaattgtcggtaattgatcgtttgtattggttaccagacttgcaaagcgccgaatcatcggcagattgtcatcgagcttaatgcctgcctgattgaagacagtcaccaaggttttggcaacggttgacacaaattcgtctgaaatggtgttttgcagcgtggacgccccacttgcagtaattttaggggcgatggcattaattttttcattcacgtaataatctagctttggtttgtgaatcttaccatcgacaaaactaagcaagtccgttgagaaatctttgggaacaacgacacctgcgtaatatttgccgcttttgaccccttcctgaaccgcctttttggagtccacaaaacgccagccgagttgcttgttatgctttagttgggtgaccagctcatcgccaatggcaatttttttgtcacggaattcggttgatttatccgctgaatacacggcaacagtaagatcttgggtattgctgtaaggatcccatagcgcccagacattgaaccaacagtagagactggggatcacaaccagcgccaaaatgagtaagaaagcgaatgggcttttaacaattcgcttccagtccagtgcaactaattttcctatgtttcgcattgtgctcctccagtgattttcaaatttgtatttgtagattataacatgcgaatattgaaaagttttttaatgcctaagctgttccccaatcatcttttcaaacctttgtcttgacattcacaagcgcgggccgtatagtccttccaacaagactttaggtgttactcagcacaactttcaaagtgagctgaatgacatttataaaaacaacactttgagaagaagagtaaccttggcgcagacgctgtagaaagcccggttgatggaaaagggtcatctgcaagaaggtgaagatgagcttcgaatagttattcgtgcggttaacgctcacgagtcggttacggccgttatgctgtcaggtatcaacaggtactggagacgatgtatcaacatcgtgaataagggtggtaacgcgacactgtcgccccttgactacaacaaaagtagttaaggggcgtttttttgtggcagcgcaaggttatctaaaataaatcaaagttgtttaacgagatggtcttgatagtttgctggtggaaatgtttggaggaggatctcttatgagtcgttggaaaaaagctatcttcacagggattgcattggtttcattattaacactaacagcatgtggcaaagcagctagtagcaatagcagtcatactagttcaaaaagtgagtcaatcatcatcggcagtagtggctcggattatcaaatttggcaacatattgctaaatcaccgcaggccaagaaggctggtctgaggatcaaagtcaagcaagtttcagatggcaacgtcaccaactcagctactgccgagggacaattggatgttaatgcattccagtcatatgcttactttcagcaatataacaaattaaatccgagcgaaaaattagcagcattaggcacaacctacctggaaccaatgggactttattctaaaaaatataaacagctgcgagagattccagatggtgcaacgattggcatctcaaacgatcctgctaatgcgacacgagggttacttttgctagcaacggccaagcttgtcacccttaagtctgacttcaatgctttaagtaccgtgaaggacattcaagccaatccgaagcacttaaagtttaaagaggtcgacccatcggtgcaaatgctgcccgatttggacgcagaactgatttcgaatacgcgggcacttgatggtgggctgaatgttttgaaagattcatttgtgcatgagaagttgaaccaaacgacacgcgccaacgtcaatatattagtgaccgcagtgaaaaatgaaaaaaaggaagaatttaaaaagttagtgccgctttaccatgatccaacgattcagagttggattaaaaagactttttctggcacgaaacttgatgtgaataaaccgatcagttatctccaacaaaaataataataacgagatcgctgtgaaaccagtacttatggggctgtagagcagctttttgttgaaggggatcgagccattaagcaattcgggttataatgacagtaatcgtaaaaattaagctttaaacactgacatttattttcgaaaggggtcgttgctatgtgttcttcaatgacaattaaatcgctacaaggtgatattttctggggccggaccatggattacaacaccagtttctttcatgaatcaccagtcggcggggttcctggtaaaattgtcagtttgccagcaaacaaggcattaccaacacaaagtgccaaatggaccacaaagtatgcagcggttggcgtcggtattgatcaaagtacggcacttttcgacggcgtcaatagcgaaggcttggctggcgacttgcaggttttggtagagtgcagctgggcgagtgcggattctttgaaacagcgtgggctgaaagctattaaaggcgaggagtttgtgaccttggccttcacgacatgcaaaaatgttgacgaagtacgcgctttggcgggtgagtatggcctgctggatgaaccttatgagtttggcggccaaggggtgaaaatcccattacattacacatttgttgatccatcaggtaaagggattgttgtcgaaccaaccgatcacggtgcctttaagctgtatgatagtatcggcgctatgacgaatagtcctgaatacgggtggcatgaaaccaatttgcgcaattatgtcagtctgaatgacaataactatcctaaggggtccgagttaggcgactaccatattgagccgattgagttaggcacaggctacgggatgttcggtttgccaggcgattacacatcaccatcgcggttcctgcgggcaatgtttgtttcgcgtaatcttgatcccttcaacagcaaagacggcattcgcgtgttatacaatgctttcaagactgtcttgattccgcaggggctaggtcgcgacccacaacatcaggttttaacggattacacgcaatactggtctggctatgacctgacgaaaaagacgattttcgtgcaagattcagacacattgacaatgacaacgaaaacacttgatccgactattactgacgtcacttatgaagatttggctaaaactgaacagttcaatcaactgtagactgacatcattgatatgaaaaaaggcaacactgaacgagagaccaatcattggtttgggggttcagtgttgtctttttgatttgtcatctaacgagccggagtggtgacttggtatcgttatttgtcgtgtttgtgcttttgccacccagcgatcggaacaactcgattattcgttgtcgtttctgttggattactagtaggttgttggggtgctggtttggcggcaacaagttcttgaacgcgactttcggcagctgtagcaagtgcctgtcgctgggttggtgtccacaggtgggaggttgttgtagatcgaatgaaaatagcgaccatttgtccaatgactgcgcgctgatcaggaccaatggtttttttgtcatatagtagcatggacatggcagccttaatgtcctgagcggtccaattctttggatcgtggccgaacaaactctgaatcgtgtgggcaaggaacaacgtggtggcaccaaagagttcctgattttgaactggcttaggaacctgcagccacgttttggattctaaaaaggtcatcgtcaattgaaataactcagccatattttcggaatcaaagtcaacgtcattatcggggtcactgaaggcatcatcaacaccaggaagatcaaaatcatcattgccgaatggtgatgtgagggcctcctcttccgtcaaaccgagcagataggtggcagtgacgaacacattcattaaggcatcaacaaattcaaggatggtcaatttaatctcatttgttgcaatcaaccagagcataaatgtttttaacagttccgccgcgatcgctaacgactcgctgcgatccaatgcatcatcatgataagtctgtaaggtctcctgcaaaccagctgcaacgtgttcagtatcaagtgcttgaatggttgaacgaaggttatcaaaggcatgcacgaaaaaggtgacgaggattaatcgaatttcatctggtggcacttggctaaagccgggaactgtcagcaggtgttgataacttgtgcttttctggaaattttcccagtatttatcgatttcgcgactggcatggcgtcgcagttttaattcgtagtccatgatctgcctccattaaaattggttggattcactaagaacagtttaacagtaacaagcttgagctgatagctgttagcattatttttagtgcacaaaaaggaaaagcgttgcccgtgcatggacaacgcttttgatattgaacgttattattcaaacatttttttcgtggcacgcatcaatgtcttgatgtctttatcataccgcggtgttttaactaaatgactcattggaatgccggtgaaatgataagcggcaatctcacctgaacgaacagcactttgctcagtgaagaccatttggaatggttgttcagcgaattcaccggtaaaggcaaggtttgttgaatgtgctggaatcacgtctggccgatcaaccttggcgcgattgttgaagagtgccgaagcatatggcatataaacagggatgttgttgatgatgcttgccataatctcatcttgatgatcacgaatattaccaggaccgggatcaactttagcaagctgaccaatcaattcaagggccatctctttacccgtcatttcgatatacggcttgttgacaaattcaccgtagcgccgtggataaaggaagtagccccacaagacggtctcgtttggtttctgggtggtaaagtgtggctgatgatgtaccacgattgacatcatgacatctttttgcccaagtgccgtgattggttgggttgacatgaacgaattcagggcgttaccagggacttgcgttgtaatacgttcgatttcgttaagcaacaaatgatctttggtcgtcaaggtgaagctgacccactcgctggctgaccgatccgcaaagaacttatcaggattaccaaggttataaaaatgctcagtcgcttgtttccacagacttgcggcagcaccgtagtccatgttttcgactgctgcatgatcaaagtcaccttgagttgcggagtcggtgatcgatccattcgtgaagaaaacggcggtatcatcatcaacggtaacatgttcttcgtcatcagtctctgtgttcagaatggtgaggcccgtaactgtaatttcatcggtcatggccgtgtctttaaattcaaacgctgtgacacgccggttcaaaatgatcttgcagccttgctccttcaggtaattaatcagtggcagcataatgctttcaaattgattatagcgggtccggttaaccccgactaaatgctcaatttgagtaaattcataaatcatcatgtgcatgtaccgccgcaattcctgcgcagaactttgtgtgcggaaggcaaaggtggtttcccacatataccagaaattggtttggaacatgtgcggatcatccttgaagtagtcggcgatgctaacattgtcgagcttttcttcttcggaatcaggcatcatgattaacttcgtcagcaaaaggcgatccgtgttattcaggcccaagtgtcctgcttggatgatgccaataccgccttccatcaaccgagctttatcaaacgtccgatgttgggcatcgaattggcgcgtgtcttcttcagctgtgagtcccggttccgttgccgatggaatccgactaagcaaatccatcaaatcgacatacgtccggtaattcaacatccgaccgccccgagcaacatagcccttcgtgttttccatgggatgatttttgttccaatattcatccacagtatcgactgttggggcaccatcatttgaaccatggtcatccagtgaatagaaggtgatttgatcaccttgccaatgagcttcctgaatgagataaacagctgcagccatattggccagccctgcaccgatcatgatcgccttatgcttgatcattttcccgcctcctagcgactttcgaacttattgtatgcgtcagcgtcatctttaaacagctccattttgtttgcgaagtagcatgcggtgccgccagcaaccagcgcaacgcctagcgctgtcaataagaatttcttcatctaaaaacgcttcctttctgatgtcacctatattataggcacaagtaaaagaagcgtctttagtcaaattgtgatgtttgttcgaaaattaacttttattgtgggccaagtgaccgcttgcggacaatgaaagcaatcgacccgtttaacatcaaatcagcccgcttgatcagattgcgttccggttctttcaaggactgcgctaaccacagcagcacttgcccgacgatggctgcaccataaaagttgcagatatcggcaacggtttggtctggtgttgctgggtcaatgtccaaaacgactggtttcaccatgtcggtggctgactgaaataagaattcttccagcatgtcacggccaactgaatgaaacgcattcagacaaaagacctgattagccatgatatagtcaagcaccagctgatactttgtttcccatgtggctgcgcctaagtcctgcatcactttacggccaatgtcagcctctaaggtccatttcagtaaggcatagatgtcatcaaaatggtaataaaacgtgttgcggttgacatgtgcagctgcgcttaactcggcaatcgtgatgcgatctaatggtttgtgctgcatttgtactttgagaaccttggcaagatgcgccttagtttgatcagatgtggacatatgcaatctctcctgtagccatggtcaacatttttggcatgaaaaaccgcttgtcagttattcaagccgacaagcggcgatgacttactttactttgagtggtttcaattgcgcttcgattttgtcgagggtgacgttggcttctagcaatgctgcggctgcataagccccttcaacaaacgcgacatcataaacatgcatctgtttatcactgacttcttcggcaatgtccaaattcattttcgcactgccgaggtcgtagaaaacaagcagttcagaagctggattatcgccaattgctttttgaatatggtcgagatccgtgccgattttgccgtcgctagtaccgccagctgtggtgatgggaacatctttagcgacttgtttgattaaagtttcaacaccattggcgatcgccggaacgtgtgaaacaagtaaaatgcctagtgccataggatcactcctttacaagtgtttgccttcatagtttgtcggttgtcgatcaagcggtcgcatctaaataggctttcaacaattcgccagttgaagcggcgccgggatcaatgtggccgacactcttttcaccaagataagacgcccggccgcgtttagcgatcattggctcggtggaagcaaccaacttgtcaatggcggcgtcatcgagcttgccttgtttaattaaatcagctgcaggtgcccagacatcgagcattgttttatcaccggtttttgcttggccgcgcttagcaataccctttgcggcagcatcgacgaggtcgccaaaatcggtgtcggttttggcaagcttagccatttcgagaaaggctgtaccatataaaggaccgctggcaccgccgactttgctcagcatggccattgcaattgtcttgaagtcttgagccagatcggtagtcggtggggttttttcgaaggccgctttgatcgcttcgacgccgcgctccatgttgttgccgtggtcagaatcgccaatcacgcgatcaagttcggtgagatggtctttttccttggtaatgcgggtttcaaaattcgtcatccatttggttaatgtatcagcgtttaacatcggtatccccccaaccaacagtgtgggctgacgcattcaggtaggtcagccattgcggatcgtctaaagccaacatggtcaatgagatgccagccatgtcgagtgatgtgacatagttgccagctttggtgaagctgacaggtaacttttcagtcttcagttcattcagcacatcgcccatgaaaatgtattgttcagacaacggggtagcacccatgccgttaaccaagacggcatacttgtgggcttgtggatctttgaactccgccgtcaacttgctaatcagttgcttagccaattgtttagaggtcggcagtttttcctgaccggtgccaggttcgttatgaatgccaacaccgaattcaatttcatcaggttttaaatcaaacccgggtttgccgacttcaggaaccgttgcagcgtgcaatgctacggcaaaggacttggtgttcttaacgacggcatcgcctaacttcttcaggtcatctagacttaaaccagcttcagcagccgcaccgataattttttcggcaaaaatagtaccagcgacaccgcgccgtccttgcgtgtacagtgaatctttgacagcaacatcgtcatcaacgactacggattcgacggtgatatcgtcaacactggcaaggtctttggccatgtcgaagttcatcacatcacctgaatagttcttgacgatcatcaaaacgcccgcaccttggtcaacttctttaatagcagcgtaaatttgatccggggtcggggatgtgaagacttggcccgccaccgcagcatcaagcatgccttgaccgacatagccggcatgcagcggttcatgaccggaaccgccaccagagatgacgccgaccttcttatgttgtttgaacgcggcatcatttctgacgaccgccgttgtatcaggaatctgtttcaaatattgcggatagctggcagcgagtccagcaatcatttccgggacaatatcgcccggtgcattgatgattttcttcatatttgcaactcccttctagttatcagtgtaaccctaacaatgctaaaatacagtgattttctagcagatattgatgttcagattgccttaaaaacggtgatggtgcaagtcatgctgaggtgggtgggtatccagcaaaatcaaatagatggcaatgctttgctgcagaaggacgcataagaaaacccgttttgctgatagcagtcggcaagcgggtgggaaaaacttttaagggtgcatggttgatcaacttatcttaatcataaagtaagcctaaaatctttgcaatcgcttacacaaaaagacacaacaaatttgactttgttgcgtacgcgcctggcagaagacacatctaaaggaatcaggcttcgatcattggcctcgggcagtttagtctttaaaatcagtcactgtttcgatcgtataattgccactatttttgagcaacttcgaaacgggacagcgattttcgatttcgttggtgaaagtcttagcagtatcgaaatcaacgcctttgaccatgacctgagcgtgcaccaaaaattgatattcagcacgggtgccaatgaaagcgaccttcacccgcaccgctcctgtatgcggcaaaccgtgctccttttcaaccgcttccagcgtggcttctagacatgtgcttaatgatagccccaaaagttgctctgggttggttccgggatgatcattcatcggactgctggtttgcactttaagtccaccgggaatataagcgtggccctccagcccttcgtcattaatagccgtcgctgtatacagcgggtggctccagcgttcatcttgcatggtgacgcctcctcatataggtcattgcggtaattcaagttttggtgcgtggatgcgaaacgtcattacttggatcaggtttctgataaggttccgggtcattggcgtgctcaggtggccgttgttcaaagccaatgtctttagtgatgagtggactgccttcccagatgagatgttccaacaacgccattgtggtttgcgcatcgctcaaggcggtgtgggaaggcaaatcaaccccaagcgcctctttgtaatgttgcaacgacggggtgtgctttttgccaataccgaatgttttacgtgccaaggcagccacatcgaaggcttgcactggggtgatatcgacattcagtcccgctcgtagcgcacgcaggtcgttacttaaggcaaaacccacaacgagttcatgcttcaacaattgttcaacggcagctttggcaagcggcaggggctgaccatattgggacaacagatcatcggtgatgcctgtgattttgactgaaaatggcatgacgtggtgatcctcaggtaattgggtaaaaatatcgaaggccccatcaacttggtgatggcgtacccggagtaaactgatttctgtcagatcaagttggttgcgatcggcgacgaactcagtgtcgatgacgatgtagtcgccgcgtgccagccgatcaacaacgtccttttgcgagcgcagtggggcttgatctgaagctaatgtggccatggtagctgcatcaagttgaattgacttagcagcgcgatcattagctgcttggaccaacggcgcttcttcaatggcaaacttggccgcaagtcgcgttgtcaaacggtcggcctgctcttgccgttgacgacgcagatcagctaaagactggtctggattgcctaacgaaatgccgaagagtctggccagccaagtcgcaggagcagttggcatgctggtcaaaacataggcgccgttaagatcggctaaagagaaaacgacctgaccattttcaagccaattttgtaagccaattgcaaggaggtgcacccagtcgctaaaaggttgcatgatcaacggcaatttgttggcggctttcatttgatctaactggtgagccgccccagcgacagctagagcgaggccgcgcgtcagacttttgcgatgattaccaaagtcttgaacagtgaatgcgattgggagtaaggcgccacgcggtcgtaaggtatagcgtaggcgaccgccttcaggataccagcgcgcgaggtcaaactgaacctgcccatgtgtattgacttgattggttgaacttggctgctctggacggtactcgcgatgttggagaatcgccatcatctcatctaagcgaatgcgaactgcggcggcattgtggggttttacgatggggtcacgcaacaatttattcaattgtcggcgagcctgccgcggtgagcgtgtatttctttgccgatcagttgtacgagccatggtgacacctcctttgagtgaaattttgaacacaggaatagtataccaagtggacacgagatttcacatttttgccatgattattcgagactagcaggtaaaaggggcctttacccatgaatgtgggttaaaaacttatttacccaaaacatgaaccgtctatggagaattgaaaagcttattttttcaaagaaagtttgcttacagattaagtttgtggcataactgttgtatggatatcaaacaatcaacagacgaaactgccttcaaacaacgaattttctttgctttgtctgaaccgggtcgctacacgattgtccgcatgctttaccacgtcggtcatgagatgggctgcaacgagctgaaccagcacgtggagattgacaaatcaacgatgtcatatcatttgcgaacgcttcgggaaattggcatgattaccacgcgtacccaaggacgacaaaaatttgttacgctgaatacagggaaaattgaatcggttttcccgggtttacttgagaagctataaataagcacatggttgcttattttttagcactgattgtttgataattttaaaactgtaaaactgattggagactttctgatgaaagaacgtagactttcgtttctattcttcttagtgatgtttgtgattggcaccgatacctttttggtttcaccgttgttaccgacgttgacgcaatactatggcatttcgactagtctatctggttttattgtcagcgcttatgcagtgggctacatgatatcggcattattgattggtccgatttctgaccggcacgaccgcaaacgtattttgatcatcgggttaatggttttcacgttggcgactgccgggtgcgggctggcgaatacgtttgcgatgatgcttgtcgccagatttgtcgctggtgtcgcggcggccacggccggaccgcaaatctgggcggctatcccggtattgtttccaaagacgcaagttgtcaaagtaatgggatatgccacggccggtctggcggttgctcaaatcgttggggtaccattggggagttacttggcggtatggtcatggcgatttccgttcttcttcgttggcgtcattgcctcgatgttgacgatgctggtcgtgcgtttcatgcccagtcttaacgaggcgacaacttcacgtcttgcaactggtatctatcgcaaactttttcagaacaaaaccgtgcttaaactgctaggggcatacttattgtttcaaactgcaaatttttgcggtttcgcctttatcggcacttggtttgcgaaaagcttccatttatcagttggtgccattggcagcttcattcttttaatcggcgttggtcagtttgttggcagtttgctgggcaaccgattagtcacttggttgggtcatccgcatgcgtttctgcttgagttcttacttttcattgctgggtatctggttttgcctttcaccaattcgccactgacggcaacggtcatcctggcatttatctatacaatcggtggcgcactgctgccattgtttatgagtaccttgcaagaacacgcgggatcagcccgcagcacgatttccgcgttggccaatggcgtcatgtacttaggtgaggccatcggtggtgtcatcggcggtatcttgattaaacagtttactggcttctcggggattgccgtttttacagcgattggcgcaagcttggcgatgttgttatatgcccagcagggatattttaagcaattgcagacgagtcgttaaacacatacagtacggctcaatgaagctagtactggaaggttgaatttttttgctaattcagttatgtggccgccccacagcatccaagccatttacaacgaagacactattgttcttgaagaatgagaaaggtatactcaagatgggaacatatgtttgctatttgggaagaaggtaccagcatgcaagaaaatttatctcagaagatcttagacttgttagacagtggccggttcttgacacttaaggaaatagctaagttattgaagatgccagagaagccggttgaggaaactttattacacttagtacgattacagaaaatgaaccgacgtcactttgcagggcgcgattattttcagaccactcagccgcaacaggcgaccagcaaattaagtgcagttgcagatgattacttagatcaacgacaggcagcccatgcgcttggagtagcgcgaacttgctaccaccatttggctgggaaagctggtgttgccttatttgaccagctgttagccaaaaagatggttgtgctgacggcaccaaatgtgtatcagcttactgaaaaaggccgccacgcatttgcgcaattcctcgggcgtccagtgcatcagctgaacattcagacttgcattgatttttcggaacgccgggttcatttggctggcaagctaggcaatgatgtcatggctaaacttgtcgttgagcaccaacttgctttgacgcagaatcgacgcgtgcaagtgacccagccgattaagatacaaccgctggaggtacgatatgctggctgaaaaacaccgttgcgcatggggacaaaccaataatgacttgatgcgcgagtatcatgatgaagaatgggggcggcccagccatgacagtcgccacttatttgagcttttgtcgcttgaaatcatgcaagcaggtttgagctggcagaccgttttgaataaacgcgctgctttcaaacaggtttttgctaactttgactatcggcaggtgcagcagatggcaccgaagattcctgtgctcttagaaaatacgcaaattattcggaatcggctgaaagtgacggcgatcattaacaatgcgcgcgtgatcgcacagttagctgccaaaggcgaggactttgatcattacgtgtgggcctttgtcaacaatcagccgattcggcatcatattaccagtcatgatcaggtgcctaacacaaccgacttggccaagcacatgagcaagcaaatgaaggcagatggctttgcatttactggtcccgtcgttatctactcatttatgcaggctgcagggttggtcaatgatcatgaagccgactgttttgttaatcaaatacttgatgagtaacgaaatatgtatgaaaaagcccactcgctgaaatttgcgagtgggcttttgaatggcacttaatgaaaaaattaaagtgcttctggaaccatcttaactggtttgttgccaatccagccggtgatttctttgaaggtatcggtgatagcatcggtgcctggcttgagcagcttacgagggtcgaagcccttgccttgctgatccttaccagcttcgatgtattcacgcgttgccttagcaaaggcaagctggcattcggtgttgatgttcaacttggaaatacccatggtgattgccttttgaacttgttcttgagggataccagaaccgccgtgaagaacgagcggcatcttaacagcgtcgttcaattcttgcagacgatcgaagtgcaggcccttccagttgtctggatattgaccgtggatgttgccaatgccagcagccaggaagtcgatcccggtagcggctaatgtcttggcttcttcaacgtcagctaattcgccttcgccgacaacaccgtcttcttcaccgccgatagaaccaacttcggcttcaacagaaatgcccttggcgtgagccaacttaacgatttccttggttttttccaagttatcttcaaagtcgaggtcgtggccgtcgaacataacggagttgtagccggcagcaatagcttccttggcagcttcgtagttaccgtgatccaaatgaatcacaacaggaacggtgatgcccatggctttaaccgttgcttcgatcatggtctggcagaattcatagccgcccatgtacttagcagcacccatggatgtctggatgataaccggaacgttcaattcttgcgcaccggcaaggatggcgcgtgtccattccaagttattggtgttgaaggcaccgatacagtagtgacctttatgtgcagcttttacaagctctgcagcgttaactaatggcatgtagatatcctcctaggaaataaacaattcacaaccgttgtattttatcatatgttgcgggagaaaagggcgagaaaatgatgagagctactcgagcagcgtgacggctttttataacacccgtcatacatatgtctgtgtgtacgcaaagtcactttgaatgtaccccgtaatcagggaaaatgctactgatttgctcactttttgccgacaaaataaaaaatgaccatcaaattgaaatttgtttgaaactggtagttgtgtgaccgcaatcggatatttagtcaagattaaatgagattactctcataaaaagaagacggaaatttgtttataagtggcacgtttcacaatttaaaatgctaactaatagaaaagcaaatcgcaataagtgggtatttcttaaattgggttagttgttgtatggtttgaaaaaatctgaattcacaaagtctgatctctttgataaatgagatcacactaagagcagttgaccatgccgttgaaagaactaaggtggagttgtcaataaattgataacaattgagttgtttgcatgacgaaatgcgataaaggagattttgatatggcaacaaaagcagcagatcagttagtcagtgttttgatggattggcaagttaaacacgtttttggattgcctggtgattcaatcgataccacagttgatgccttacgtcgacatcaggataagatcaagtttgtgcaggtgcggcatgaggaagtcgccgctttgtccgcagcggcaactgctaagttaacaggcggtttgggtgtttgtctctccattggcggccctggcgccattcatctattaaatggtttgtatgatgccaaaatggatcatgtcccggttctggccctgctcggtcaggtgacgacgagcaacatgaatgaaggctttttccaagaagtgaatacaccgaagctttttgacgatgtggcggtttataacaaaactgtcatggcatcggataacttaggacaaattgtcgatacggcgattcgcacagcctttacagaaaaaggtgtggcagttttaaccattccagatgatttgccagctcaaaaagaagctgctagttatcaggacagcgccgctgcttttgccttgaatgtgccgaaagttgatcctaaacagttagaggacgttgcttcgatgctgcaacaggcacaaaaaccacttgcgttgatcggtcgcggtgctgagcatgcaggtgcgttggttcaaaagtttgtcgaggccaatcacataccgtttattcaaacgatgccagcaaaaggcactatcgccgatgatcatcccaatagtttgggcaatgtcggtaaactaggtacgaagccggcatatgaggcgatgaaagcgactgatctcctcttcatgatcgggacgaattatccatatacgccttatttgccagccgaaggtcaagctaagtgcgttcaaatcgacacgcgcccagaaaacttgggcaaacgttattcagttgatgttgctgttgacggcgatgttggcacctttttcaccgaactgaatgcgaagggctccttgcgtgatgatgatcgttttctgaaagcttgccagaagaatatggagagctggaataagtggatgagcgaaaagcgcttgctggctactaatccggcatcgcctgaagcagtcttcgcgacgattgatcaaaccgcgccaaaagatgcgatttactcgattgatgtcggtacgtccacatcatggggtgcccgtttcttgaacgttcagccaacgcaaaagtatacaatttccgcatggctgggaaccatgggctgtggcttgccaggcgcgattgcgggtgctgaggcttttccaaagcggcaaaatatcagtgtcgcaggggatggtgccttcgcgatggtcatgcaagactttgtcacagcagtcaagtacaagttgccgatcatcatggttgtcatgaataatcagaagttggcatttattgaatatgagcagcaaagtgccggccagttgaactatgaaattgatttggctgatatggactatgccaaaattgctgaagcagcgggcggcattggctacaccgctcgcagcaatgacgaattcaaaaatgcattagccaaggcatacaaagagaccgataaaccggttctgatcaatacctacgtccaagacgatgcaccgcttccaggcaaaatcgttggtgatgaagcaaagggttacatgaagtacggttccgaatatcttgagaattattggaagattccgtccatgccgccattgaaggatattatgcggcaattcttctaattttcgattagcttgtatcaaaaataaatggcttcaataaaaaatccccactccgagtcacgtccgaagtgaggattttttttacttagagggtctcccgccaagccgccatctctgtttgccatgtcttgcgagcctcatcgctaggggacatgttgttaagtgtcacttgcgccagctgcttgtcgaacgaaacatcgaaataggtccaatagccgaaaacgtgaccggcatggctgaaccaatttggcgttttcgaatgcatccaccccatgccgtagaagtcgtgggtgagggtcagtgcctcgtgccaatctttttcagacagaatatcgtggcgcaacacggcctgcgcccatttggcaagatcggttaaggagctgacaacggctccgtccccaccttggtaggcacctcggccaagcacgacaggtttaccagccgtaacgtctaggtcatcataactgttggcctcagcatattgtgtcccaagtcgtgtctgagtcatcgccagcggttcaaagaaatgttcctcaaaaaagcgtgctaacgaatcgccagtaatttttgagatgatgaaaccaagcaataagtaattactgttggagtaaacgcctttttcacccggagtaaaatccagtggatgttgatttaacaatgaaatgaccttggtaatctcatcgccatgaccaagatcttccaaaatagggtagctaagatgggattcactggcaccaggcatgcgtttggcataatcagttagtaaaagctcggtgtaatcaggaatgccactggccatattcaacatctgacgcaaggtgacttgatcggcatagcgatagttcggcacataatctactaaggacgcctctatgtcaagcttgtcagccgcgttcaggagtaacacgctgtcagcggtgaattgtttacttagcgaacctaagccgctagttgtttgaaggataaacggccgtttcattgaaaaatcggcggcaccattttgccaacttgaaagtatttcagtcggattcacgatgatggtcgccccattgagatggtacttttcattaatcttttgatagccttgccaatcagtcacgtatgctcctcctcgacgggttcgtcaacccagaaacctgcacttaaaatggtcaaagtccgatagacgtgttgtctgtacctgaacctgacagacaagattcagaaagtatgaagcaactgtagcatcgcttgccaccgaattcaaatcaaaatctcattttgccaatctgtttgttttgcgtcatatgcacaatggttgcacatgctagcggtgactgcgatgatggacttatattcttagaaggagcgttatgtcatgtcagatatatatgatgatcccgcattttttaaagcatacagccagatggatcggtccaaaaagggactagcaggtgccggtgagtggcatgaattaaaaacagttctgccagatttttctggtaaacgggtattggatttaggctgtggctatggttggcattgccgctatgctgctgagcatggcgccaaaagtgtcctcggcattgatacctccgctaaaatgttggctgaggcagcagcaaagacgaccgaccagcggatcacttatcgccggatggacatgcaggcgattgatcaattgccggatcagtttgacattatcttgagctcgctggccattcactacattgaggattacgcccagcttgtgaaaaaaatcagtgataagctgccagttggcggtcattttgtcatgtcggttgaacatccaatttttacagcccaaggcaaagaagagtgggtcacggatgatcaagggcacaacctttactggccagttgatcgctatttcgatgaaagccagcggaagactgattttctggggcaccagattaaaaaataccatcgcactttgacgacctatctcaataccttgcatgatcatcagttacggttgaatcgcgtgattgagccgacaccgacagatgaaatggttaaaaccattccggggatggcagatgaattgcgacggccgatgatgctcattgtggcgactaccaaaacggcgtatactcatgaaaaataaatcctaagtagaatagaaggaaataaatcgtgaagccaaaaattgggattcccacagatgaattgatcgaagttaacccagtgatgccaaacaaccatcctgcctatgcgccgcatgatgtaaaagaggcttttattaaacttgatgctttgccgctgatcattgcgtttcctgatgatgtcagccagactgagcagcttgcgcaagattatgtgcagctgattgacggtctcatgttgcctggtggtccggatgttgatcccacattctatggggaagaaccgcatcccaagattggcatgacgctttatcagaaagatcttttcgaaattgcattgatcaaagcggcactggcggcaaataaaccgatctttggtatctgccgtggcattcagatcatgaatgtggcgatgggcggtacgttgtatcaggatttggaaagtcaataccctgatttgaaaattcagcatccccaagccacactgggccaatttgcgacccaccatgttgatttgacacctgatagccgattggctgccttgtatgggaagaccacgattaaagtgaactcgcggcatcatcaggcagttaaaactgtcggcaagggcatgcgggtgacagcggtggctcctgatggcgttgttgaggggatggagtcaattgacaatgatctttttctcggggtgcaatggcatccagaaaacatgtggcaacaagaagatccgcaacaattagtggtttttcaagactttttggatcggattgctacacatcaaaaataaggatgttacgattagctcgaataacagaacaagcacctgatcagctcaaaaattctttgagattggtcgggtgcttgttttatttcgatgaaggccttggtgcttcatgattgtcgatagtttttcgggacaaggacatggtagctgctgtaaaacctgccaaattagtgacgctatttgcaaattcccccgcgacaatttttagacaatctttccttttatttaaaatcatgtaacattagggccgaacgatacatatgtaacggtgttttttaaccgggtgtatctgaataattggcgagggcattctaagaggaggaaatcaacatgggcgatgaagccgtcatcgagcagctgacagagaagcaaactgagctgatcgagtttctgtatgtggattataacgggttaacgcgtggtaaggtgattccgcttgccagcttgaaggccaagctggctgatgggattgggttgaccaaagcaaccttgaatgtcagtgaacgtgatacgattttgccggtggcggacatgacgcctattggcgaactgcgccttgttggtgatccggcgtcggcacatgtcctaccctatatgccgcaagtcgccaccttaatgggggatatttacaatcttgataaaaccccgtacgcatctgatccgcggtccattttgaaaaaagtcgtcaagcagcttgctgatgctggcttcacggtcaaaatggcctatgaaaatgaattcgagttatttactggagataaagatcatcgcgaaccggcaatgccacatgtcgccttttccaccgagtccatggattttgcgtatccattcattctgaaggcgatcgatcaactgcaaaaagtcggcattatgccgaacgcttattacccagaaggtggcattggtcagcatgagctgagcatgttgccgagtgatccggtgactgctgcggacaatgaggtgatttacaaacggatcatcaaaaataccgcgaaggcttttgacctatatgcctcattcgcgccaaagccgctagttgattcggcagggtcaggggcacacattcacttgtcactttggcaagataaagaggatgctttctttaatgacaaggcagcgatgcaactatccacgattgggcagtattttgtcggcggtgttttgaaacatattcaaggtttgctggcattgacctgtccatcggctaattcatatcagcgcttggcacctggtcattggagcagtgcatacgccacatatggtcaagacaatcgtgaggcggcaattcgcattccgtcaaccagttggggtgatccggccagctcgatgaacatcgaactcaaggcaagtgatgcgacggctaatccttatttggcttttgctggtttgctggcggcaggacttgacggcatcacaaatcacatgcaaccggatggctattgcgatgttgatccagccagcctcagtcaagctgagcgcgatgccaaagggattcagcttctgccacgcacactgagccaagcggttgacgcttttgaggcagattcgctattccagcaagtatttggcaagcaattggtcgatgcctacgcgaaaatcaagcgcgaggacgatcagtattatgccaaattggcattggaaaaaattgctgccttgcatcgcgaattgtattaaactattttgacatgatcgttgtcatgaaggctggcagcgatcacgttgtatgaaggcacttcgctttaaaacttctaggaaagcgtgagctggtcattgcaccagcaaacgtgtgaaggaggaagtattttggacgacttatctgagcttgtcgaccaagtcccattgttggatcatcattgccattttttgattgacggcaaggtaccgaatcgtgacgaccggctcgcgcaggtatcaacggaagcagacaaagattatccgcttgccgataccaaaaatcgactggcttatcacggctttttagccttggctaaggagtttgcgcttgacgcaaataatccattagcggccatgaatgatcccggctatgcgacctacaaccatcggattttcggccattttcactttaaggagctacttattgacactgggtttgtgccggatgatccgattcttgatcttgatcagacggcagagctcgttggtataccagtgaaggcgatctatcggcttgaaacgcacgccgaagacttcatgctggaacatgataattttgcggcttggtggcaggcgttcagtaacgatgtgaagcaggccaaggcccacgggttcgttgggttcaaatccattgctgcttatcgggttggactgcaccttgaaccggtcaacgtgattgaggcagcggctggattcgatacgtggaagcattcaggcgaaaagagactgacttccaagccgttgattgattacatgttgtatcacgttgcgccgctcataatcgcgcaagatatgccgttgcaatttcatgttggttacggtgacgctgataccgatatgtatctcggcaatccgctgctcatgcgcgactacttgaacgtttttaccaaaaaaggcttgaaagtggtgctgttacattgttatccataccatcgcgaagccggatatcttgccagcgtgtttccgaatctgtactttgatatttcactgttggataacttagggccaagtggggccagtcgggttttcaatgaagctgtcgaattggcaccatatacgcgcatcctatttgcctccgacgccagcacctacccagaaatgtacgggttggcagcacggcagttcaagcaagccttggtggcacattttaaccaattgccattcgttgacctcgcccagaaaaaggcatggatcaacgccatttgctggcaaaccagtgccaagctctatcatcaagagcgtgaactgcgcgtttagaaaccagagcgtaagcggccttaagcctaaatggccgggttttggccatttaggcttaaggtccttatgtggaggtttctgcgcaagtgaacgcgtttaaaagagagcgtgattcagcccggttagaaaccggagcataagtgggcacaagtgcgatggccgttctttggccattgtgtttgtggtccttatgtggaggtttctgggctggagaacgcgtttaaagaggagttccttcactaatcatgcaaaaacgtaaaaaattaagcttactcgaggtattcggtctctcgatagccatggttgccccaactggcgccatgtccttcaacacggcaagtgccgccgccaatgcgggcatcaatatgcctattgctttcttgcttggtgggatcggcgtgttattcgttgcgatttcttttgtcgaacttggcaagcgcattcccggtgatgggtcagcctatgcttataatgccaaggcgcttggcgaaaaggcgggcttcatttccggctggctgctcgtgttgacgtacgtgacctttgttttcagttcgggcgccattgtcggcaattttgctgacgtgtttttaagtcattttggtattcatttaccagtcaacttgtacaacatcattgtgctgctgcttggcggctggcttagccataaaggcatcgaattctcgacaaggctaacgctggtgcttgagctgttggcggttttggtgctgagtgtcctgactgtcgtgatcattttctcaggtggtcgcagcggcaattctgttcagccgtttattccacaaccgcatatggcgaccggccttggtatgggtatggtatttgctttgatgtcttttgccggctttgaaggctcggcgacgattgcgccacgggccacccatccgcgcaaggcgattagtattgctttgctgggtgccgttagctttgcagcaattttctattttcttgtcagttacgccgaagtcatcggttttggttccgcccacatcggcgatcttgcgaaaagtaccgcgccaatgaactttcttgcgacccattatctaggcacgaacgccgcaattttcatggactttgcggcgatggttagttattttgcctgctacttcggtgcgctcaacgccggcgctttcatgctggaagctttaggcaaaagtggctatctgcatccttggctggcagaactatcaggtgacaagcagaccccgacgcacgcgctggatggcatcactggcttagcgttaatcgtttatgcgatttttgcaatcggcttaggtgtgagcgccagcgacatgtacaactggttcggaacgattggcatgctcggcttgctaacggtttacgtgctggtcaacattggcgccattgtttacttccgcaaagacaaggggcgatcaatgtttaaacatgtgttggcaccagtcatcggcattctcgtgctcatttacccaatttacaccagtctctggccgatcccggcattcccaatgaacaccttcccatacatcgcgatcatctggttcctgatcggtctatgggtcgcaaccaaacggcgcaatgttgaaacgagtttggaagatttttaaagttatgacccaaaaagctcaccatttttgatggtgggctttttgattggacgtaggttgcgactatcggtcggtcgctacaacttgcgaatgtctaatgccggccttgacatacttctccgtaccatcagccacggcttggcggtagtaaccttgcttgtactcgattttatcgagggttcgttgcaggtcagccatttgggcgagcaccgtgacgtgtaactggtcaaaaaagtcacggcgtttctttaaggttgtatcgccttcaagattccactgcatgaacgttttgatatccttgatcgacatacctgctgttttcagacactcgatcatttcgagagcgccaagattctggtcatcaaaacaacgggcaccaaaagcgtcttttttgagttcagggatgagtccttccttgtcgtagtaacgaatggtggggatcgatagctttgtcatcgtggcaacttcaccaattgaataagatttggacatatgatgacctccaattttttaaataatcgcttgacctaaagctaactttaggggttagggtgagtgtagcacttgatcaagcgtaaggaaaatccactcggtcacgaacgtttggtagtgatgactgggatgaaagatcaaggcagcattatttgtcgaggagggactattatgttagaagcaacttatacattagcaaatggcgtacagattcctaaaatcgggtttggcacttggatgattgatgccgatgctgatgctgcgaaagctgttcatgaagccattgacgccggttatcgccatattgataccgcggaggcatacggtaatgaagtcggtgttggtgaaggtgtgcgtgcgtctgggatcgatcgcaaagacatttttgtgaatacaaaactggctgccgaaatcaaaaaccatgatgaagcggtaaaagcgattgataactcattgcagaagctgaacttggactacattgacatgatgattattcatgcaccgaaaccctgggctaagtacgatgaacccaatcgttattttgagggcaatttagaagcgtggcgcgccttggaggaggcatacaaagcaggcaaactccgcgcaatcggcgtttctaactttgacccgactgatttggaaaatatcatcaagcatgccaaaatcgcgccaatggtggatcaagttttggcccacatcacgcagatgccattcaaaacgattgattatgctaaggcgcacaacattttggttgaagcttactcaccatttggtcatggcgaaatgttcaaaaacaccgcaattcaagccatggctgctaagcaccacgtttcggttgctcagcttggtatgcggtatctgttgcaactgggcctgctaccattgccaaaaacggtcaacccagaacatatgaaggcgaatgctgatgtcgatttttcaattgacgatgctgacatgaccacactcaagcagatgaagccgttgacggattatggccagtttcagaactttccagtgtatagtgatcgtttgagttagtgccgacacactgctggtaatatcagaaaattgatacgacaaaatgaggtgctgataaaaagcgcctcatttttgctatccttgtggggatttatcaaaactgctcagttgattgccgatattaagctcacggcccattaaccacgactttaccaatcatatgccctgactcaaccaaggcatgggcttggcgcagattttcggcattcaatggctgcagggttttggttagcgtgcattgaatagtaccgtcatcaagcagcttagccatctggtcgagaatgtgaccttgtgagtcaaggtcataaccataccaagacttagaaaacatccattcccaggcgaacgtcgctcgttttttagtgagtttctgcaagtcaatgccgcgccgattttcggtaatcgctgcaacccagccatcaggacgaatcatctccgcgatctcgttccaatggtcatcaagatgggagagatttaaaatataatcgacgttcttgaaaccagccgcttttaactgtggtggcaatggctgccgatgattgagaacgaaatcggcaccgtggtccttgatccatttttgcgaatcaggccgtgaagcagtggcgagtacctgcaggccggcccaatgtgcaagctgcgtcgcgactgaaccgaccccaccggagccattgatgattagaatgatgtgctcagcgttcgtggctcgatcatgcagtggtatgtgcaacttttcgaataaagcttcccaagcggttaaactggttaatggcattgcggcggcttgcggatcacttaaagatgccggggcatgcccgacaatgcgttcatcaactagctgatattcagcatcactgccagaccgcttgtaactgccagcgtaaaagacgcgatcaccaatcttaaagcgggtaacatcgcgaccaataccggcaacggttccgactgcgtcccagccgatcacttttggatgagctaagcgaccatgaccagcgccgcgcgtaccggtatcgacaggattgactgagacagcatgaacgttaatcaaaagatcatggccctcaggtgttggtgtcggtaacgttatattttcaagactatgttcatcagtaatcggcaaatgctgggtgaatccaattgctttcatgacgagacttcctttcaatgacttaagcttcaccttgtatgttaactggaaggcactatcatagtaagtgaacaaattgtaagtgaaaacgatgtggaagtcagcttctgcatcagcaaatgtgtttttaagggaagtcctattgatgtcacgagaaatttacgattgtgctgcaggctgtcccgtccaaaatacggttgacgtgattgccggtaaatggaagagcgtcattctctatcatctttttcaaggcgacgcgactcggttcagtacactcaacaaagccattccatctattaccgagcgcatgctggcattacagttggcgcaactcgaggccgataatattattgtcaagagagctggtcatgcagacggacgggctacagaataccaattaaccgcactaggccagaccctagcacctgtcattcaggctatggcagcttggggtgaagcatataaagtgcggcaaaaagcattagtttaattaagaatagtctttatgacggcaaaaaactcgcagccagacactgcgagtttttttgtttagtcactcattaagtacccgtgaaaatttaagttcacaaaatgccagcgttcttttgaagactgtgccaatcaagagaataccgatgatcggtccgatcatgattttgccgccaagcaacatgccacttaaaaaacagacaagatccatccccatacgtgtcttagcaacatcaatggcacatttttccgctagggccaagcttaaagcaatatacccttctttaccggtactggctgctgcggcgatgccggagccgatggcgattaagacaacccccaagactagcatgctgacacgtatgcccatatggctatcgactaaaagataacgaataacaagatcggtgacaaggctggtaacgattggattgataaccgttcctaatcctaagtggcgacgattgatcccagccacaaaccgatgcatgcgacggttaccacgagtgaggcttgaccgactgtaatggctaatctggttgcgatgccttcccaaagaacgcctaacgcatccgcgccaagtccagtcgtgacacacgtgcccacaccaagaccgacgatggcggcaccaatggcagcaatgatttgtcgtttgattgctgtcatcaactgagatcagtaccatttgaggcgattacttttttgtaccagttgaaggaatctttcttaatgcgctggcatgtcttaggatcgtcatcggttcgatcaacataaatcaagccgtaacgtttgttgtagccattgcttgtagaaagcaaatctaaagccgaccatggcatgtagcctaaaacctgcacaccgagacccatggcgcgttgcgtggcggcaatatgctcgcgtaagtaagcaatccgatagtcatcatgcactttgccatcacttgtgagctcatcgcgtgcacctagcccgttttcggtaatcatgaacgggatgcggtagcgagtataaagatcgcgatagacaatctccaacccaatgggatcaatggcccagtcccaatcagttgtccgcagttcgggattaggacacatttggtaaaaaccaggatgcgtttcaaatcctgacatgtcaccttttttgccagttaagttataccctgaccaagcatgatcagcaccttcaggacaagcgtgatcgcactgactgtcataatagttgacagcaagaaaatcggagatgttttgtgaaaagagggtttcatcgtcgtcaaagatttcgggtgccaactgatgttgcttcaaataattgaaggcagcatcggtgtaataacctttaaaatacacgtcaagataatagaaatttcggaggtcgttggcattcaaggccgccagctgatcctcaggcttgcaggtgcgagcgtaaactggcgcatagcctaatgctgggcctgccaaaccaccgacctcgtggatatatttcacggctaatgcctgggcgaggttcatatgatgattgatctgataacgcaattggttttgattttgatacttttcgggtacataacacttctgggtccaatattggacgatgatgctctgttcattgattgtgatccagtacttcacatcatttttgaactcattgaccacaaacttggcaaaatagccaaagtcttcgacaacctcgcgagataaccagccttcatatttttcaaccaaagcccaaggcaggtcgtaatgatacaaagtagggatgggctcgatatcgtttgctttgagttcagcaatcaaatcgcgataaaattgtaaaccttcttcgttaacctgatgatcgccttttggaaaaatccgcgaccaagcaattgaaaaacgatagctagtaaaacccatttctttaaataagcggatatcttctttgaagtggtgatagtggtcactagcgatgcttgtatcggcaaagccaaacttttcagatcggttattgttaataaaatcttgttgcgaaaggcccttgccgtgggtgatcgcggcaccttcgacttggtaggcacttgttgaagcaccccaaaggaaattctctggaaaacgctgtttcatgtggtcacactcctttaatcagatagatgatggctggttcgacgaaacggcatcggtcaacacaacttcaaaaagttcaatcatgttctcggtcatactgatctcactggcaatggtcataagatgatcttgcgcgtgagtaaatagcagcgatggctcatagtgccgtcctgcggcttcgttttgaatgatttctgtttgtgcttgatgggcaagcgttatttctttctttgcagaagccagcgcttggtaagctgctgctaattgcttgttcttggcaagctgaaccgcttcgagtgctttgttgcgaccgttgcctgcataaatgataatttgcatggcaacgggaatgagaggactctcgttggtgtctttttgcgtcatcacttttctccttgtcatagtccgatatgcgaatgattaaactgccggttgtaactgattttcttcttggaggacttcccgttcgtaaactttgaaaaatggataccatgttgctagataaacgacaaaaagcagtacgtaccagatgatggcgcgaaaatcttgcaaaataataacactggaaattggtgcgggaatctgcgcaacttgcatcaaactagccggaatattcagcaagccgcctcgcatgaccgcccaaatgacacaactgccgataattgaattgagccacattgggatcatcagtataggattcatgacaacgggggtactgaagacaattggctcgttaatattgaatagcgatgggccaaggcagattctgccgatggttttcaatttggcgcttcttgagaaacacatcaggagattcaaggttaaagttgcaccagtcccacccatcatgatgagcccaaggctataaacggtttcgttggtgacaatgttgacggcgttgccaccatttttaaccgccaaagcgtttgccgcgatgcctgcaatgaagatagggttctgcaaagctgtccataaccaagttgagatccccatagagtagaaaaaggcaggaatcaaaaccaacagaatcaagccgggaagtgattggccaaaattttgaattggctcaaaaagattcaaaataacttggaagacgtcaatcttgaaggcgaagatgaaggtcgcaaacaaggctagactgataaaaatggggatgatgttgttaatccaattagccacgaaatctggcaacgagctattttttagaaaattcagcttgctgtagaagtggaagatgacgccaatggcaacgccgaatagaacgccaatcaggatgcctgtcgggccaaccctacctaaatcgtagacaccttgtttctcgccgattggatgaagtgtcatcatcaaaacgcagattgacacgattcctgctgtggtggcgtattgtggatgtcgaaacttttccatgaattgatgaccaaccatgaaagccgcaaccaaaccaatcatgccgaacgaataattggagatattcgttaagtcaggcaactgcggaatataggaacgaaaaacgttgtagaagaagaccactgatccagttaaaataaaaggaatgagattctgcatcgcacttgaaagtgcagcgatagcaggcatttgggtgaactttttggctttaggggcaaaaacgttagccaaccaatccatgaatattttcattattttcctcccggcagctttctttactctgccagccgatttgcaaaagcaatgaggccagcgccatcgagactgccgtagatgtcttgcggaatgacgtcgacgacaacattgaaaggttcggcctgtttcgcgagttcatcttttaacgaggcgtaatgcgggcccagtaataaaatgtcgatatcttgaaaatactgaccaatttcactttcactttttgcttcaatggagacagcctgccctttcttttgtgctgccttgcgagcacgctgagcaagaaatccgcttgacatgccagcgccgcagcataacatgatattaaccgctttcattttaaacactcctttctagtgactttattatcgcgaatgaggagaaatcggctcaactaaaaaaatgcaccgtgacagtgcaaatggttgacgaattgttagcggttgcgtgcaagcaataggcttttttgaattttgggagaaccggttataaaaagaccggaagggagcaagatgctaaataacaaccagcaacggctattgcaactgttattcgaatccaatcaaccactgacggctaatcagttatcagagaagcttggttgttcagtgcgaactgccaaaacttatgttgcgcagattaatcgattagcggcggagccactgattctatcgtcacgacaagggtacgtggctttaaaaactgaggctaaacaattattaatttcaacaaacaatgcaagtgatatcccacaaacctttcgtgatcgtgctttttacatcatcaaacaaagcatgattcataaggcgcaattggatgtctttgacttggaggaaagcttatttgttagctatggaactttaaaaaatgatattcaaaagatcaatcagatgttttcgaaatctggcgttagggtagtcattcgcgataataaaattcaggttaccggaaatgaaaaagacaaacgccgactgatttcgcatttcattatggaggaagcacctcatcatttcgttgatcgatccttgctcacacaaaactttaatcgtaccgatgttgaacagatcgagcaaattatcaaagaagaattagcgccatcaacattaaaactcaatgattatgcattgataaatctcatgatgcatttattgattatgattcaatccttacatcacgacgatacattgctatcccgcgatgcctatagttcatggctaaacacgtatgatgcggctattgtcacgaaaattattaaacgtattgagaacgtttttaaccttattttaaataaacatgagcgtgaagagatccacatgttgtttcatgctaatgttgaccatttaccgctaagtgatcgtgacaagttaaccacaactgttggtgacaacattgtgcgagcgatgagctcattatttgcagaagtccaacacatatttgggattgatctagataacgattatttcgtttttccgttcagcttgcatctcaacaaattattttctcgcgccatgcagggatccagtctgaacagtccgctaaccgaatctttaaagcaggattttccggtagtttttgagctggcagtttttgtttcttttcggcttagtcaattgttgcacattccaatcacggaaggcgaacgagcatatattgcactgcatattggtgctgaattagatcgccaaaagcaacactctgaaaaaatcagaacagctattttttcaccgaactatatgaatttgaacacgcaactgtatcagcatgtttctaagcaatttgagcatgatttgaatgttgttgccttggtgaatgacccttctgagcttgataagctcgatgtttcgctgcttatcacgacagtacctcaggcttcatcgatggcttatcgagtcgtgacaatttcgcctttcatgacgagtaaagagaaaagcaccatcatggcgacaattgaggaacatcgtcgtaacgtacaaagggattttttaagacgctattttgatatctacttcggtgagcaattcttctttacattgcagccaatcatgcaacgggatcaagttgtgaccttgatgtgtgatcaactggagcaccgccatattgtgtctccaagttttcgacagcatgtttttgaacgtgaagaagcggctggtactgcttttgggacggtcgctctgccacattctgtgtacatggaagcaaggcagacaacttttagtgtcggcatagcgaaaaactcaattcgttggggagagcgacgtgtcaatattgtcgttcttgcagctattagtcaaaatgatcaacagcgctttatgcgtttgtatgaagccttaatcacgatgttcagtgagccgcaagtggcgactgcccttgcacgtgttaggaattttgaacaatttaaaaatgtcgtcaaaacaaacatgtgaggtggcttattgccctagtttttataacatgatgtgtcagcatactgagcctaaattaaaaagtggttgaccacattagcaacaagctaatgtggtcagccactttttaattttagcgctaagaatcacatttcggccacagaacaatgctccgtacttaaatctcgaattctgcgtttaagggtagccgtgctaataccggtttctttggaaatttgttgatacgtcttaccgtgcatatgtgcatcgaaagctttcctaatttgttggtcactataaagctttttgcgaccttcatggtaattgggattatgtgctcgagcgtattttttcccttcttgtgtccgactaataatcaggtctcgttcaaattgggcgaaagccgagaaaacggtgaatatcagtttgccggtcggtgtctcgtcaatgagaccaacattcaggatgtgtatcccaacatgatgatcaaacaatgtctgcatgacatccaatgcttcacgcgtattccgcgcaaagcgatctaactttgtcacgaccaagatatcaccaaactgcaacttagataataactgtttaaaaaccggccgacccgtggtcgtgccggtgtatttttcctgataaatttcatcgacacctgctctacgcagttcttctatttgtgactcaagacgctggccttcagtgctgacgcgtgcatagccatatctcatcaaaacactcctatcatcaaggccgaattgtatcacaacttgaaagattagagccgaaagcaagaactcccaaaattatagcataaaaatgttttatggaaacaattagaattaaataactatcggtatttatcgttgaggctgtttcttatttgttattaagtggacaaaaagactggctcttaagtgtcgagttgtaagcgcaagaacaattgcaatgtcagtggctaaaagttcacctgagaggagggtaaaaatgtgacgaagatgacagctaaagtggcgagaactgggcatttgttcgcggtcttattgattttgatgagcatgttaacaggcttagtgacaagtggcagttcagttgtgacagccgctgctaacattcgcccaacctatcaaaccgatgctaatggtacctatccgacaaattcgtggcaggtcacgggacaacaaaatgtaatcaatcaacgtggcggggatcaagtttcagggtgggataacaatacaatatggaatggtgatgcgactgataccacgaattcttacctgaaatttggtgaccccaataatccggattatcagattcgaaaatatgctaaagagacgaataccccggattgtacgacgtttatttgaacgtcaaaggcaatacccagcaaaatgtgaaacctgtagatattgtcttagttgttgatatgtctgggtcaatggagtcaaaaaataatggcggcacagatcgagctggtgccgttcgtactggcgttaagaatttcttgacttctattcaaaacgccggtctgggtgattacgtcaatgttggcttaattggtttttctagtcccggctatatcggtggcggcaataaaaccactggaccgggttatattcgcgttggattaggcaaagcaggaaataccagtcagcaacaagcgattaatagcgcattgagcccaacttttaatggtggtacgtatacgcagattggtttgcggcaaggatcagccatgctgaatgcggacaccagtggcaataaaaagatgatgattttgttaacagatggtgtgccgactttttctgataaggtaaaaaattcagtggttgaaaacggcacattgtatggcactaactttggaactaccagagatgaacccggctataccgcagaacttaaaaatccgtacatcgatagttcaggtgattatatatatgatacttggccagcaacattaggtgaggctaagaaggcaaaagatagcggtaatgtggtgcacgctttaggcattcaactggctggcgacgacggctactggtcggaaggctacatgtcagacgaagatgtgcgtcaaaatatggaacttattcccacttcaccagatctatacgaagatgccgatagtgccgatgccgttgaggcttatttgaataatcaggcaaaggacattgtcaaaaactttaatactatcattgacggcacgatcacagacccgattggtacgcaatttcaatatgcgaacaaccaggcgaccgttacgagtgtcggcaagcaaactgtgccagcaagtgagttaccaagtgcgacgatccaagatggtcaattgacggtgaatcacatgaacttgggtcaggatcaggaagttcaaatccattatcaagtacggatcaaaacagaggatgctggcttcaagcctgatttttggtaccaaatgaatggtgaaacattgttgacaccaaaagcgggcgctgccgctgttgactttgggattccttcaggcagggcaccagcaactacagtttatgtgcagaagcaatggcgccagttaagcaatcaatcgttaccggatacgctcaacgtcacggtgcagcgaaaagtggctgacggttcgcttgatccaaattggcaacagaccttagtccttaaaaaagctgataactggaaagctagctttacggcacctgcgtataacaatcagggtcaaagtttttcatatgtcgttaagagtgaagatgcctcgggaattgatttgagttcgtttatcagttctcaaaatatggatcagcaaacagcaacgttgactttgacaaatcagcagtatggttttcaatttcagaaaaaaacaaccgatggtactgatttatcagcagatcagttgaaggccatgcagtttaacttaacccagtacagcgataacagttttcagcaggcatccaaaaccaacgccatcacgtcaacggatctgcaggcactagcgccggggtattacggtattcaggaagctgcagcacctacaggttatcaacttgatgggacaacgtatctttttcagctaacgtctgatgggcaatggcaataccatggcacaaaggacaatgtgacatcagggagtgttattaatggccagcagactttgaatcctgttggtgataagtcagatgattttacggtgaccggggatcaccagcaaattctgacgctgacgaaatatgatgaaccaaagccatccatgactttgcgggtcatcaaacaggataatcaaagccaatatcttgcaggtgcagcgttcaccctgcaaccaagtgctggcgaagctgagacgataacatcatcggcgacatctgagggacaagcgtttgcgacaaaattagttgcagatggtacctatacgatgtcagaaacaaaagcaccagatggctatcaaagcaatcctgcaaagattgccattcaggtagctacgactggtaaagaggcaaccgtcacgattgacggtgaggcattgaagccgggcgaaagtaagaacggatacacattagcgattgatggcagcacgatcactttgcaggcgattaatcagccacttgcaattttgccacatacaggtggtcagggctatcagcgattgcttggtatcgcactgggattgatcagcgcagcgttccttttattactggttgttttgataaagcgacgggtggtgaagcaacatgactaaatccttccgtccgttagtgattttgaccttttgcttggcactactagtcagtttggcaacgacaacgttgcagcagacacaggcggcaactgtgccgaccactgttgatgttgtgttgcataagctgttgtttaaagataccttgccaactcaacaagcaaataacgggacaacaaaacccgacttttcgcaggcagatgtgccgttaaacggtgtgacgttcacagtttgtgacgtgaccgctgacttttggcagcttgtctccaaaaatggcggtgcgattgaagcagcacaaacgacgttgagtcaagatagctatcagcctgcgagctccagccttatcgcacaggttgtgacggctggtcagggagaagcgtactttggcgatttaccactccgacaggggcagcatgctgcggtttatctttttaaagaaacggcggcacctaagaatattgaagccagtcagaatcttgtggttgtcatgtcaagcaaccttcaacatgggaatcaatcacgcattgatttatttcctaagaacaaaatggtaagtcgtcacaccgacgccccaaaaaaagttccaaagaaaacacgtcaattgttgccacaaacgggtgatacagttgcagcttggctttcaacgctcgggttgataattttcgcgacagtacttgcttttaacatgaaaaaacaaaaaattgataattagggagaaaagaatgaaaaagacaattgccaagaaagtgctgacattaaccagcacgatcctaatgacattactgatggttctcgggtttaatggcactcgggttcaagcagatacgaatgatacgacaacacaaaatgttgtccttactaaatacgggtttgaaaaagatgttactgccattgatcgtgcgactgatcaaatttggactggcgatggtgctaagcctttacaaggcgttgatttcaccatttacaacgtgacagccaattattgggcatcgcctaaggattataaaggcagttttgatagtgcttcggttgccgcaaccggtacgactaatgacgaggggcaactaacccaagcattgccaacccaatcaacagatgccagcggtaagactcgtgctgctgtctatcttttccatgaaaccaatccgcgagctggttataacacgtctgccgatttctggttaaccttaccagccaaggcagcagccgacgggaatgtctatgtctacccaaagaatgttcaaaagaccacctatgagcgcacttttgttaagaaagatgctgagactaaagaagtgcttgaaggagccggctttaagattagcaatagtgatggcaagtttttgaagttgacagataaagatggtcaaagcgtcagcatcggcgaaggatttatcgatgtattggccaataactatcgattgacgtgggttgctgaaagcgatgctactgttttcacgtctgataagagcggtaagtttggcttaaatggatttgctgataacaccacaacttacacggcagttgaaacaaacgtgccggatggttatgatgctgctgccaatacagactttaaagctgataattcgtctagcgacattctagatgcaccaagcggtattctgccacacactggtggtactggcacagtcatttttgcgattttgggcgttgccttaattgcatttggagcagttgcctatcgcaagcgccgcaatggtttctaaaaagttaataagataaatgagtcaagcaagagcgtcgatggcgctcttgttttgatatggcgaggtaatcagagtgacaaaacgaacacgtcgacctttaggcttgattgatattgtgattggatgccttcttttagcgggttttggtgttttatgctatccatttgcaagtgatgcttacgtttcttaccaaaatcagcaagtcatcgacaggtatcgacaacaagaagcgcggaagaatcagatggtgttgcggcgggaatataacgactatcagcaaaaaaataaacagttggcagcaagtcagcaagtgcccggcgttgccagttttaatcatgccgttaatgatcaaggaaccgcaaaaacagcggccaaacgcaatcagcaaatcttgactcgtcagacagttgctcagttgacgattcccaaaattggtcttagtctgccggtttttgatcatacaagcgattggcttctacaatttggcgcctgtttattggatggtacaagttatccaactggtggtaaaaatacccatgctgtcatttcagcgcatcgtggtgtgccaaacgctgaactttttacccgagtaccagcgttaaaaaaaggcgacaagttttttattagcataggcaatcataaattggcttaccaagtctttaagcgccaggttattgagccaagtgatacccggcagctaagaattgtgccgggacaggatcttgtgaccttaatgacctgcacgccttatatgattaattctcatcgattgttgataacgggtcgccgaattccttacgttaaggcagatgacgaggcctcaagttgggcggtttggtggaacaaattaaagctaatagtcgcacttttaggcgcggtgatcattttaggcgtgatcggtttcgtaatgcgcagtttgatgcttggccgaaagcattatttgctggaagtaccggctgaagccacacaagtcgtggtgaaacgaggtcgacatacacattcttttaaatcagatcaaactggggtgactgacatcagcctgcctggtaatcattatcgagtcgcaattgtcacgccacttggccggactaagtacaaggcttatgtcaaaaaaattcgggataaaaaattcacacttaaacgatcttgagcgtacctgtgtcattagatgactcagcaactagtctatttttggtatggtcggctttgacggtgagagcattcgctacagcaacttgtgaatgatttggtatactaaagaaaactttagtgatgccagatagcagcatatgaacgagatcgggttctgatctggggaacgcgttaagggggcgaacgctatgaaacaacttgagatcgcgcatttggacaaagcttttgatcagcaagttttgtttaaagatgccagtttcatgtttaatcaaggtaaaatatatggcttgttaggccgtaatggctccggaaagtcgactttattcaacatgattgtccgcaacttgccacatgatcacgggacgattgcggttgatgccgatgatggtcgtgggttaattactgactacgcagatacaagtgtggggatggtatacacgcaaccgcacttaccggcgtttacgacggggcttgaatttgttaactactttatgagcattaaccgaacgcgtcttgaacaagcacattcgtctgtgcaggcgaccgattttttcgaaatggctgggttgagtcaggctgatgcgaataagcttttacgcgactattctgagggaatgcggaacaagttgcagattgtggtatcgctcatgctaagatcgccagtattgttgttagatgaaccattgacaacagttgacgtggtggcggcccatgagatgcaacagttgattgtggcgatgaaggcggaatctgtggtcatcttttcaacccacattatgcagttagcccaagctatttgtgacgctgtggtgctgttgcataaccaacagttgacagagctttcaggcttggacatccatagtcaggcgtttgaggataccgtgattgctcggctaagtgacgaggtgcgggccgatggttgaagcgtggcgttattactggtttcaagcgcaagttgatgcaacgactatggtgaatggcctgatttattttatccggcggctcccaatattaggtaaaaagataccgactaagttatatcgtatgggtgccgtaaaaagtctgattgcgattatcatgagctgcttaatgttcatgatgaagccactgatcgcaatgcttttactagcgatggatttcttagtagccaatgcctacaacgattttatccatccgttaccgacaacgttcacatttcgtgcgatggtggcagtgacgatctatacgctgggtggcctactgtttcggggactggtctttcgttatattccagttgatttaaaagcaattaaattagccgactattttgtgctcgatcggcttgcgttggctcgtgggctgacgcgcatacagcaagtgattggcatcgtccttggaccattcttaccgttttttggactaacgatgatcactcaaaattattggattttattcgttggtttgggcgtatccgtttttagttggttctggcgcgggtttatcccacgcttgacttggtcgaaccaccggctggggatgatcgtacaaattctgtattggtgcgggttagtgggcgtgccaatcacgctcgtgttgaccggcaagcttacaccattcgtgactgggttgttttcgccaataggcttgatcatttgctggattggggttttcgggttgtggtggtatcagtaccgcttctcgaatgatatcccactgttaatggcatcgattcaacagtctgtcataactttgaacaaggtggcggcaacacagaagcaacaatttttggcaactggtaccgcgatgcagaaaaaattgacccttgatacgacggtttcggtcaaagtgaaccagcgacttggcaataactatctcaacgcattgctattcgcacgctaccgcagtcagttatggaaaaaattgcgtacccgcgtgttatggattagcggcattggcgtcagcggcttgattcttttaaaattattcgcgattcactccgtgggggatttgaccccaatttacggcgccttgtttttcgtgatgtatctggcctcgctgggcggcccgattgttcagctactattcgttaactgtgattcggcaatgctcttttacccattttatcgacaacctaaagccgttttaagcgggtttttctatcgattttggcggatcgttcagtacaacgccgtgacaggtgcgttaatctatggtctgttacttgcccttcaattggtgacaccagtgccggatcacttgaatttctatttggttttattgttagaagtttgcgggatggtgttgttcttttcctttcatgatttgtttatctattacctgctacagccgtttacggaagatatggaagtcgtgtcgccgttatatcgtattttatattgggttgcgtgggtgttcactcaggtccatctttccggctacacttatgcgcttgccattggggtgatcacatgcatctatgtggtggcgggcaccatcgtgatttatcgcgtggcgcctaaaacattccgtattcgctattaaacatcgcggttagattgatgctatcatcaatgtcaatctgagttgatgggacaaagctaagcgggtactttcaatgccgatgagtcgagaaaaactgatttatcggtatttttgtgtggttttttggccagtttgcacgggctacttttgatgagcctgacgtcgacagctgtttgaacgtgttgcaagcgattccgccagcgggtacagtaggcataacgaaggaaaatattcttcaaaaagaatgctaattagtttccatgaataaattgttgtcaacagggaggcaaagctgatgctaagtgatgaaaggcttcgcgggacagtgcttgcagtagacgatgatatcgatattctaaggatgttgaatcgttattttgctgcccgccttccgacgtttaacctaatcacggccgagtcaggcgcgggtgcgttgcaacggttgaccaataatcctgatttgattttgcttgatgtcaacctacctgatactgacggcttttcgttggcggaacgaattcgggcgataacattggtaccaattatttttctgaccgcacgggtgactgatgaggataaagttcgtggactcggtgcaggcggcgatgattatgtgacgaaaccgttcagtcttgctgaacttggtgctcgcattaaggcccactttagacgggaaagccaaccgcaaaaacgtgcacggatggcgatttttgatcagattctcatcgactaccgcgctaaacaagtgtcaattggcgatcaagttttaagtcttgaaaagaagcaatatcaactagttgagctgttaagcctgaatccggggcaagtctttagtcgtgaacagctttatgaaaaaatatggggttatgacgctcttggagatgatcgagtcattacggaacatatccgccgcattcgacttctttttgatcgatatcaagtaacctcaccaatcgaaaccgtttggggagtgggctataaatggacaagttaaagcagcgcctaacgcgttttccaataaaaaaagctttgctgcatctgattctgatcggcacaattgccgctgcattggtggtgttggtctacttgctgatttggcatgtggtgatgatgccaattgcaactgccttggccaagcgctggttcattggcgggatgagcttatactttggtggggcaattattggtagttttgccatgctatacgcagtcatgaatgtcacagccagacttttttatcgtgtgaaattggggccgccgttggatcaactacaatatggtgttactcatattcaggcgcaggatctggacttcacactacagccgacatctgatgatgaactcggtcaattagtagccgcgtttgaggaaatgcgccaagcattacgcaaggcgctcgaaaccgcatggcaattggctgatgatcaaaaacaagtcaacgccgcgtttgctcatgatttgcggacgccgctaactgtcttgcagggaaatctggaattgttaacgttcaatgaagaaggccagccaccagatcaacatttactagacgagatgcagcgacagcttgatcggatgaacaactttatcaaaacgatgagtcatgtgacctctattcaaaatattcggttgaatcatcatgcaatcacagaagcacaggttgaacaacagcttcgttcagaagtggataaattaccaacagccaagacgattgactggcaagttgatagcacccggtcgacagacaacaagttatcggtttcgccagacgctatccttgaggtgtttgataaccagatcaataatgccctccggttcgctaaggcaaaggtggggattcatctcaccttcaatgaccagcaaatcaccttgcaggtttgcaacgatggccagccattaacggcaactgagcaacgcaaggtcaaattgccttatttttcaaatgataaagcagcgcatcaccttggcgtgggcatgtatatctgcaatcaactatgtgcagcacatcgcggttactttaaaattcaaaaccgtgaacatgcggcgggtgtttgttcgacagcggttttcggctattttgacggcagcgccaaaagctaatgttaccaacgatgtcagaaaaatgctgaaaaaaagtattgttgtcagaatcttgtgaattgcttgttaaggtctccttgtaagctaaaggaggcttttttcatggaaaagattaacatcgaagggctcaccaaacgctatcgcggcaaggcggcgccggcgcttgatcaagtatcgctagaaattgagacggggatgtacgggctgttaggcaaaaatggtgctggtaaatcaaccttgatgaaaattctgaccacgctggagcagccgacagcaggtacggttgaagtctgcggggtgccgatcaaagcggcaaaagcgattcgtcaacaaatcggctatttgccgcaaagattcggcttttaccccaacatgcgagtcgtcgatgccatgacttatcttgcggtattagccaatgtcccagcacgggagcaatctcagcgaattcaacatctgctcgaagaggttcatttagcagacaaggcccgcactaaaataaaagctttgtctggcggcatgttgcaacttttggggattgcacaggcgctcgtcaatcgtccaaaagttttaattgtcgatgagccaactgctggtttagatccagaagaacgcattcgcttccgaaatttgctgacagattttgcaaatgagcgcatcgttcttctatcgacgcatatcgtgtcagacattgaggcaacgaccaatacgatcggaattcttgatcaaggccggcttttgttcaatggcacaaccgatcaactcctattggcggcaaatggccacgtgtttgaaaaagaagtgtcagtggcaaagttaaacgagtttaaacggcatcgtcggattactgagcaagtaacggatgggacaatggttaagttgagatttttagctgccagtcagatcaataccagtgcgcaagttctgccaacgttggaggaggcttatctatatttgcagatgaagcatgaggaggccttcttatgaaactattttggatggaggtcaaacggcaaacaatgagcctgacttttacgatttataccttattagtgatggcatttgtgttgttaaatatgtggccaatgctcgcacgaaacgtggcggcgttgccgacatcaactaatagctacgacgatatcacagcaaccgacttccagacgcgcaaaacaaacggcgttggccagttacgatacgactatcagcacaatacttacgtcacgtatcccttggggtttgcaaaaacagtgacactaccaaaggcagatcaggcccgcgttcgtagtttgctgacacaagccaaccaagcagagacacaagccacattggtgaaagcactgggacaggtggacaggctgattggcggacaatcggcttacggttcacagaacattcaggggtttgcatcgcgaccgatgacaaaagccgaggcacggcaagatcacaatctgattctcacaaaagaccgtatcagtggcacctttgctcgactatttgccgattacgccggtattgttatgggaattctacccaccgttgtcgtcatcgcttattgttatgctgatcgtcgaagtcgtgcaacgacaagtctgcaatcgaaaatgaccagtacttggcgactagtaggcagtcgatacttagcaagtctcgtgacacttttgatgccgatttttttgatgggaatcgtcttaaccattcaaatcgctctgcattatcaagggtatcaaatcgattatctcgcgttcttcaaaatgaccggactgtggttattgccaacagtgatggctagcagcgcagtgggctttttaagtgatgcgctttttggcaattttctcggattcgtggtgcagattggttggtggttgagcacgatgatgattggtgcgcggcaagttgctggcaattatggctggttgctgataccgcgacataattcactgcataacgttgcctactatgaggctcatctaccagaattactgtttaatcggttaacctatgccgcgctcgccattggttttatttgcttagcggtggtgttgttaaatcttcagcgaggaggaaaatttcatgccatcaactttgaaacgcttggtcgggttagaactcaaagccaacgagtgcagcactagtttgatcgtgcttgggtgtggcctgctcatgccggttgtttttacgatgacgccaagcaacttagcgcaggctgccatgccgggcgagttgtttctgccactgctgaccatttttgcttttggcagtctgtttttaccagaacaaacggtcgagattggcgcagtcattaatagcaagcaaacgcaactctggtggctttatctgttgcgattcatttggtatgcggtggtactggcgatgctggccacagtattgatcggcgtttatgcttttttgaatgttggggtcaatctgctcatactttggttcgactttgtcgtcaaaatttttttagttgggagcatcacggttttgagttacagcttattgcgatcgctggcagtcgcgtatctcttgccaacagcgtattttgcattgtgtatcggttatcgctatttaggcgcggtgaatatcatgacgttcatgcgtcatcgggcagtgtctgacaactggattcagttgctgctagctggactatttttggcgatcagttttctgagtttgaaaagtcgaccggttcggggatgacaggaaaaaagtttgacagctagttggtgctttagtgctcgagttagtggtgggaaggcggcgattggaaattgtgcgatagacaggcaaagagcttcatgccggttgctgctggcatgaaactctttgttagtgtttgttgattcggtgatttgtcttgatgctgttaactgactgattagttgcaattagtttttttcatgtttctttttactcgtcaggccgatgcttagcgcaaagaccataccaaggagggcgatgcctagagcttgcaaccaatgactgttttgcatccccattggtggtaggactttcgcagctgctttagttgaatggactgattttgccagtgttttttcttttgactctttttgtttgagagccgacgttttttgatccaaaggcgaggcgggttccgcatccttaacagtttctgctttgagacctttttgaacaataaggattgtgtcatcctctttttcaactatattagatttcggatctttttgacgcgtcttgctgatggtttcctcgtcatcagtcatttcggatttttctcgatagcagtcggattttcctggttatctttgtccgacttttggtcgattactttttgatcaacgttcggttggacgggattgtcttcggttgaaggcgttggtttagttgcttcaatcgaaatagtaggttcgtcgggttgcgatgttgcgtctgttgacgaatccgtggtgtcagggtgattggttgcatggtttgagctctcgacttcagttttagtcagcgtgttttggccagatgttgtcgttgcagtgccgaactccgccgtatcgtcgcttgttttagctggtgcgatggtctcagacgaaaccttcttgtcgtcagttgctggtgtcacggttgttttcgaggtgtcgatttgggtgttttgctcacttcccgttgtgagtgtttcgaccgttgatccagtggttgtgttgtcacttgatggggttgcctttggatcaactttggactcagcagcagaatctttgccagcctgtgagtcactgacggatgtttccccgatatcggggtgatggctctcggtgttttcgacatcgacgctttccgttgtggctttcggcgctttgtcagcagttggtgaggctgtcgctggcgtgatgtcggaattaacggcacgatctttgtcaattgctgggtcagtgacaggtgacggggtgtcagtggacttatggcttttgactttttcgactccggtagtttccgtgaccgtttcaatggccttgttatcaattgatgcgattgtcgttgcgtccatttccgacttaatggaattatcttcgcttgccttcgggtctgcggcaactgttgcaatggtaccagctgcagcctctcgattgtcttcggctttagcctcttccacggttgtttcatcgatgttgtcttcgtttggtgtgattgctgatgcgtttgattctgacttaatggcacgatcttcgtctgttttccggtctgaaacggttggttcgacatcatcggatttgttacttttatcatgttcacctttggcgtcttccgcgactgtttcaccgacctcggttttacttggcgcggttgcctctgattcaatttctgacttagtggcacgatctttaatcggtttcggatgagtgaccgttgtttcaaccacattgacttgattgtctttttcatcttcggttggtgtgttttcctttgttatttcagtggctgtggccgtgttgctgcttggcgtggttgccactgattcaatttctgatttaacggtaccttcattgtcatcttctgtgtcagtaacagctgattcaacagtatcggttttattacccttatcatctttgacatcggcatttttcgttgcagtcccagaagatgtcgccgtgttatcacgtggcgcgatggctgttaaatctatttcggactttacaccactgtttttggccatagtcggggcgatattcgtttcagcagaatcagatttactgcctttatcattttcggttttgctatcttccatggctgcttcaacagctttgtcgttactttgcgaacttgcagctgaatcgatttctggcttaacggcactatttttgtcagtcgttacatcagtgatagccggttgggtgttggcggattgatgaccttccttttcagcaattttatcgttttctatggccgccttaacagctttgtcgttactttgcaaacttgcggctggatcggatttaggttgaatagcactatctttgcttgtcgtgaggtttgtgacagttggttcgtcgtcatcagttttattgcctttgtcctcattgactgtggtttctgttgcggtctcaactacttgactgtcaggtagtgaggtcgctgttggatcaacttccgacttagtggggctctctttgttcatcgccggatcagtgtcagtaggggcagcggttcctggtgtgttgtctttggtgtttgttgcttcagtggcttcggcgtcagaatcaacgcccttagcgtgattcggcatcgttgtggctgcattaggactgttatcaactggattttcatcaacacctgttgttactgatgctggtgtttttgttgccgtgtcaccgtttccgtcactttgagcttcctttgatgtatctatttcgacaacggggttacttgtttcaaccttgctgtcttccggattgaccatcgttggttcggtgcttggcgtcacctcagttttttcatcgctggatgatgttgtgaccggtgcttcacctgcatcattcttgggtgtttgatcttgttgttcaggagtaatttctagttcatccaaggattcttccttgagaagttttggtatcttagtgacgttgaacgttttcgttaccatgttgccaacctgatcaactgcctgcagggtaatgatattgaggccatcggttaattgataggtttcgtcaaatgatgctgcaccatatgggttgtacccgtttgtaagttgattcggcgtggccgaagattgatgtgcattgaaacccgccagattttgctgcgtgaagatgttgttaccgttgctatacaaacgatagccgccgatattgtcagtcacactccccttaattgaaaaagtgtcagcgtccgtggtgacaaggtaggttccatcatcgtcaattttcattgaatcagcatctgaaagctccagtgtcggcaaggttgtatccatataaagcaacaggaagccgccattggtcttctctttaccgtctttatcgagagttgtgaggacatagccaatattccgctcctcagtcgggttgcatggcatggtcatactgaaagaaccatctgctgcaaacgtcacttcattttgaggatcattttgtctcggggtgacaaaaatgcgtaacttactgtttttcggatcagataccttgccacgaagcgtgagggtcttaagcttggcgtcgtagaaagtgctggcgctgtcaatgcctaccaatgttcgtttgttattgttcaggtcaagaaatgcaatgccgttgatgaactttccctttgtggtgattggttttgaatagtcggcacccgaaatcaccttggcacggcccatcacggtagcttcgtcatcaaacgggtcggttttagtcttttcgttagagtatccagtgtattttttggaagtgaagatgacgaactcagcaatactaggtgattgaatgaaatcaccaaacccatcttgggctaatgcagtgatgctaaggcgggcataaggatacccagtcgcatcaactttaaaagttactgtcccggtcgttttatcaagatttcctaaataatcgcgtccacttttactgtcagtcgcggtgacgataaaatcttgtcccgcgggcaccatcgcttgaaccgtatagatgctgtctttggttgccgcttggtagaggccatctggtcggatgatgttatcagtgccaattggaagcgaccagcgtacttgcggccaaatgaatggcggatcaacttccttattttcaccattgattgcttgaatggaagcttcagaacgattacctgcgaggtctgtgatggtcagcatgagcttgccatctcctttttcagaaggacaagctgttcatcgcttagctgataacttaacgttcctgaggttgattgattgtcgtgatttaaaggaatgccataggttgcggaaccgatggtgagtttggcttgactatacgcggtgaaacccacgccttggtcgctatagtcagccgttagcttgccgtctgagtaagccaaattggatagcgtcggtttaatcatatcgacggccactggtaagctcatggtttgcatgttattttcgcctggtgtataggtcataccgatcagacgataggtgtaaataccatcctttgcaggcaccatttgaccggtggtttgatcatagacttgaccgtcccatttgagcttatcaggattcagaaacattgagattgatttggcaagatcagcattggtagtgctgccgacctcaaggaaagacttggtggtgtcagtttcttgatcaatgacccgcattactttgtcatcttgatctaaaatctgtgcaatcacatgtttaagattttgcttggtgaagacatagggggtgatggtgtcagaaatgccatcgccatttggtgaaaaagcgactttgttgttctgaactttggccccaatcgtttgccaagtgaaaccattcgttgggttattgactagctcgctcagcgatgttggatcggtaatgcctaatggattgtggttgttatcgacaaggtagccacctttaaagatactgccttcttcgtttgcgggcttgtcgaacacggcctcatcgttggtggaaccgtaatatcccatgtaaggaaccgaaatggattgacggtcatcggcggctttgaatttgataaagccttctaccacttgatttaatttaaccgtgtcatcaagcgaaagggtaaaggtgatctttttggatgctccggcatcaagcgtgaaagttggcgtagcagttgtgagggtggcaccagacaatgtgcgatcatgaacggttttgttgttggcggtgtcaatcacttcggtagcaggttggccaagatcaagcgtgtacgtttgctgatcggtaccgcgattttccaccgtaatgacgaatgatttgctaccggtgaattgttgtaatgaaacagaacctgcatcatcggtgccttctgcactgaccgtcaaatttgcagcttttgcaacatcgatttgacctgcgccttgacgccgaggagagatgatttgtccaaggtaattgatatcgagtattgggttaacggcattcatcaaggctagtttcactgcctttacgagttgcgcaccagttaagtttgtactgcgtttcagattttgcatcaccagtaagctggcaccggtaacataggcatttgcctgtgaagtgccgctcacttttccaagtccatcattcagtaaggtagaggcaactttttcaccaggtgctgtgatatcgggttttaatttgtaggatgctgttggtccccatgaagaagcggatatcaaagcggccttaggatccagaacatcgtttccggcagcaaccgccatagctgatggcgttgcgctaggtgtcgtcaaagttgaagcattggcagggtgataactggttgtgattccatttgaagcggacttgtcgtaaataccaccggcgtgaccattattgccggtagctactgtcacaaaaacaccatgatcggttgcaaatttaatggctgcctgtccttcagcggtaggatcatcaatatcaacgcccatgccaaaggagatattgatggcattcgcacctaagtccactgcatcatagatggcccgcgcggcattattgagtgagtcagaactggacttgcctagtattttcatgctgagaagttgggcttccggcgcaattccagttacatatttctttgaatcactagattgaccattagcagcgatgataccagcgagatgttgaccgtgattactcgtgtcaaattttagattttcgttgacgttcttggtgtaatcgtaaaagaatgggatcttttcattgacataatcgccatagccatgacttgcagtgaatgctttgatttgatcctctgaaagtgcagccgttttggcatcgctgagtcgaaagtcttgatgtggctcaacaccttgatcaataacggctgccaccatgccttgacccttgatattttgatcccagagaggttgaacattgcctttagttagactggctttgttttctgggttggatgttggggctggttttgcaattggagctggttttgctggggctgctggcgccttttgtgctggctggctaactgttttttgagcagttttggtattggttgttgccggggtggagggggtgaccgatgtcggttgagtaggttgttttgccttagccgatgcttctggtttagcctgtgacgctactggtgctggggtagcaggtttcgcagtggctgtcggcgttgcacttgcagctgttgttgttggggtgtcggctgaggacgttacttgtccagtggtcgtggatgctggcttgctggcaggtgagtcagcagctgtcgcggtcggtgctgcttgttttgattctgtttgggttgtcgttggtggggcagcggcgtcagcagaaacaccttgagcaggttgcatcatcagaaaactcgctgcaccaaaagtcacgatggcactgtagacccaatgtcgccctgacttatacattttgtagcggcgcttttcctgtgaaaatggcttgactctgttcatttttatttcctccaatggtatttaaagcagtcgtttgtaaccggcgccatcagcgatatgtgcgtcaataagtgatccagtgaatccttgtttgtaatttaacccgttataaaactaatgtcaatcataaggcgtagaaaattaacccggtttaacgttttatttagttattactgtaggaggtgaataattaaacaattataaaaatattcagatgggtgtttaacgaaatggctagatttatttaacgatgaataatcataaaatacacgaatcaactaaattatttgtgtgatatagatggataccatatgcgtgtatctatgaacaaacgcttgttttatgacaggcgttgagcgaacttttaaatgctttcaatcatacagaataaaaatcaatgccttcaatcaaaaattgggttcaatatcaggttcaccgttacgaaaaaatgctaagtactgtttccagcaattagcattttctcttggctgaggttgaaggaatactgaacacaatagtttttgtggacggctttcccttgtttaagaattgaccttgtttttctcgcgtttcttcttatcagtgacaactatccctagcgttgtcatcaggctgatgatgatgacccctagaatttgcaaggcattacgatgcgaattcgccatttgtggcaacttggagctgacaccggattgagcgtcgtttctggtactcatggcaggtgttggggctgcgttgattttggtggctaggtcattgtcagtggtagcatttggtacagtgatctttggagcatcctcgtcaccaccattagcggttgattcaaaggaatcctttcgttcggttttgatggcagcgtgcgcactgacttccttttcattatttttgtcgtctttaaatgctctcttagcttttggttcagtggtcagttctgtaattgccgatttaatgccctctttactaggcatttttttcttcccattttctgttaaaacagaagcgaaggcagctccaatgtcgatcttctcgtctgcgattgctatcagagcggtatcactggcgttagctttgtcgcttgagtctgtgtcggctactgaatcatgagcttcatgaatgaccgcttgcgaagaagtctcaggtttagcagctttttcttcgttgatatcgctgctatcttgaggcactttgtcattgagaaccgctgttttcacgagggtatctttgacttcagtgtcagtcactactgaagatgaatcatttttaggggtggtagcgtcatcaaaagagacattaccttgagcgtcttcgatactgtcaacagctgatttcgcatcattggtgtcttcaattgccttatcatcattgggggccacttcacctttagatgcttcggtttcgctaagggcttcctgcgaagaaatatcacttgtagcatcgttgtcctcgtttgaagtcacgttgtctttagacattttggcatcactaaggaccgcttcaaaagaagtatcttcatcaccatccgaagttgtctcatccccaggttccttggcttcacttgaagtcacgttgtctttagacattttggcatcactaaggaccgcttcaaaagaagtatcttcatcaccatccgaagttgcctcatcctcaggttccttggcttcactgaaaatttcctctgccgagatatcgttttcaacatctttatctccgtctgggaaaatgttttcgtcagattctttggcttcgctaaggactgcttccgaggaagaggtctcttcactgtcgttgccgccatctgggactaagtcatctttagctttttcaactaaatcttcgtcaacgacatgttctacaaaggcatcttctgcagaatctttgacttcacgatcttcactttgaggatcccgcgtatcatcagaagccattacagcactagcgtcagtcacgccgtcgccgtcattagccgattccgtgcttgaaatttcaggactatccgtcaccgtttgatcttcgacgtcagattcagattcttctttaacatcaactttcttgattttgaacattttgacagtgcggttgccgacttgatcgacggcttccaacctgacaatgctcgtaccaacgggcaaaatatatccgcgcttaaacggcaccgggtcatatgggttcgttctgtttgcgcctgcctcagctgttgccgccggttgatggatgttgaaaccagcacgagcatgctgagtgaggacattgctgccgttactgtaaagacgatagccatcaacgttatcgtcaatggtgccttcaagggtaaaaatatcggcactggtttcggcggtgtggaccccgtttgcgtcaacggtcatgtcatctgtgtcactcacggtcaatgctggtggtgttgtatctaaaatgatttgaaggaagccgtcagtggtcactttctgaccagttgcgttaatgctcgttaaggcataaccgacattcttttcttcagttgatttgaaaggaaccgtgacgtcaaacgaaccatctgctgcgatgattgcctgattttgcgggtcactcaaattcggcgtggcaaaaatctgcaagtcggtatgcgaaggatctttaatttttcctctgatgtgaagcagttgatgctcggcatcatagcaatgactggctttatcgacacctactaaagtcaagctgttgtcgttcagatcggtaaacatcaaaccgcttgttggcatggcgcttaacaagttgtccgagaatttccgccccggcaatggttcggcactgcttaatcgcgttgcagcgtttttggccgttacttcgtcatcaaagctttcagttttggtgttgtcattgctataagcgccagcgtcaggatcgtggaaaaccaacagcgaaggaatagccggtgatttgatgaaggttccgaattgtggctcataaagcgcataaacgtctaggttggcatagaagttggggttttcaacatcgaaagtagcgatgccggtggtttggtcgcttctttcaacatagacattgccggtgacactatcttttaaaacgacaagataatcaccatctttaggcaccatcacttgaaccgtgtacttgtcatctttggttctgatttcataattgccatccattctgagtccgttaccatgaacaatcggaattgaccagcgaacttgtggcgtcggcgtggtgtccacttctggcagatactcgccggcaactgcttgaatcgtctgacggctgctgttgccggccaaatcggtgattgtcagcgtcagtttgccatcgcctgcttccagcgcgtcaagttgatcgtcgcttagctgataggtcacggtaccggtgtttttagttccttcattgccaagagggacttcataggttcgcaatccgatggccaatactgcggcgctatattgggtgaagccgacaccttgatcttcgtaattgaaggtgatgtcgccattgtcataagtgaagtccgtgatcgtcggtttgacggtatcaatcgcaactgggagattaataccttgccgatttcttatcccagcagtgtaggtagtgccaacaaactggtaaacatagcgaccatcttcggcagtcaccaacttgcctgttgctcgatcataaactttaccgtcccatttgaaaccatcaggatggcgccgcatgctatcggacagggtcaaatccgtattatagttagtatcttgcatgtaatgtgacttagcggtgtcattttcaagatcaatgacccggacaagatgaccgtctgtgtctagaatttgggcggcgacctgttgaagattttgtttaacaaaaatacgcgggatgacggcatctgaaaccccatcgttattgggggaaaatgccactttattgtcttttgcagaggcggcaacggtttcccaattaacgtgataactaccgctgttaacaatgtcgcttaaggtgagcggatcggcaatgcccagtgggtaattattttcatcaagcaaatagctgcctgtaaaagtacttcgaccttcattagcagcattatcaaagacgacttctgcattggttgagccataaaaacccatgtaaggcatggaaatggattgactgtcgtccgcagctttgaaggagatgaagccttcaatgacttgatgcagccggacagtttgatctagggtcaacgtgaaggccacggtttgtgacgcgcctgctttcaaagtgaaagttggcgttgcagttgttagcgtcgcacctggcaaggcaacagcataaatgccattagtgtgggcggtgtcaaaggtttgcgtgaggggatggccgggcacaaccgtataagtttgatcggttgtgccgtggttggtcaacgtgatagtaaacgttggtgctgcctcgaattgttgcaaggaaacggaaccggtttgatcagtaccttctgccgtcaccgttaaaccgctggctttggcgacatcaatttgaccagccccttgacgtcggggtgagacaaagttgcccggataatcatgatccatcataggggtagcagcattcatgagcgctaatttgacagctttgacgagttcaacaccagttagcttagttgtttgcttgagatgctgcataacgagtaagccagcacctgctgcataagcactggcagccgcggtgccgctcttggtcgctaacgcgttgtttttgccaatcgagacggatttttcaccaggtgtcgtgagatctggtttcagtttatagtcagtagttggtccccaagacgagttatacgccatggcggatttagtacccagcgctgaattttccgaagcaacagtgagggcactaaggccgccacctgtcagcgaaagcgtgctatcatttgtcgtgatataaccagccgtggtgccgccggggacggaggtgccatgaatcgccatggcattaccgttgttactcgtggttttgatgacaaggacgccgtgatcggtggcaaattgaatcgccgcttgatcttcagcagtgggatcttcaacatcgacaatcttggccagcgataaataaatcacatctgcacctagcgagaccgcgtcatacactgcacgggcaacgttatttgtggtcagtgattttgcttggcccaaaaccttcatgcttaggatctgtgcttccggcgcgaccccgaggatatagcggccatctggtctttcttgtccattcccggcgataatgccggctacttgttcaccttgaatatgattatctaaatgcagattagtattgctattggtggtgtagtcatagaaaaaaggcagcttgtcattgagataggtaccatagccgtgactagcagcaaagtcggcaatggtttcttttgaaatcttggccgtcgtgttgtcgcttagtcgcaacatatcatgcggttcaacggcgctatcaatgacggcggcaaccatgccttgtcctttaatattttcatcccaaagcggttgcacattccctttggttaaaacggcctgattaatcggtggtttggctggcgcaggtgttggctttgtttggaccgcagatcgcggagaagcggttggcgccatgactggtgacgctggtgtttcaacaggcacagtgactttaactttatcggttgcaacaggtgcagtttttggcgtagcggttggtgttgctgatacgatcgatgcggcatggctgtcagacgctgccttcgaatggtcagccggttttgttgaaggcgcttcgacttgattggccgctgatgttggctgagtttcaattgcgggggccgctggtttgtcaacgctgggctgggggttatcagtgggagtcggtgatgcggtaacgggctgtttgtctttgagttcggtatgcgatttggcaagcgtcgtcgcgctggcagtcggtgatgcttcatcagcaaaaacggtttgcgttggctgaaacatcagaatgccagctccgcctaaaacagcaatggcactataaatccaatgccgtccggccttatacatcttatagcggcgtttttcctgtgaaaagggattcagtttgtacacgttatttcctccggtagtcattaaaacaaaatcttgaaaagtgagttgtagcagctctagagaagcgagtgtcttgctcattttctctcatgtctgtaatttatcctgagataaaactaatgtcaaccattagaaaaataaaataaattggttttagtatgttagctagttgttaaaataaacaattcgcattatattaattgacttttaatcgacaattgaatttctaaataactgaggatcttaaaggttatttagcagcatttaaaaattgaattatcggtaatatctgcggacacgatcagttgagaaacggcctgacacgcaagttcaataaccgtattttcacgcatgtaatttttttaagtcgctgagccgatttttggcgaaaagaaataagtctgtcgatttcaaccgacaccgtgagcttttcgatacttggcaaccccgtaaccgtctggcttggcgtataatgagcgtaatcttacaattcgaggaggaaattatgactgaagcaacgcatttttatcaggcatttcaaccggcacattatgagctttacttggctattaaccgggcaaacaaaacgattaccgggaaaacaacgattactggtgaggcgaagcaaaccgcgatcgcccttcatcaaaagtatctgaaggtgagtgcccttcaggccgatggtcaggatgtaccgtttacgattgatgatcctgcagaagcgattcgcatcactttgccccaatccggaaaggtgacgctgacgattgactacacggcaccattgacggataccatgatggggatctatccgtcttattacgaagttaatggagtcaaaaagcagattattgggacacaatttgagacaaccgctgcccgtcaggcttttccaagcgttgatgaacctgaggccaaggcgacatttgatttggctatcaaattcaacgaacagccgggtgagacgatcatcagcaatatgccggaaattcgcgaagaaaatggtgtgcattactttgacaccaccgtgcggatgtcgacttatctgatcgcgtttgcttttggcgatctgcaaaataaacaaaccacgactaagagtggtgtgaagattggcgtttttgctaccaaggcccacaaaccaaacgagttagactttgctttggacattgccaagcggtcgattgaattctatgaagacttctatcaaaccccatacccattgccgcattcttggcagttggcactaccggacttttcggctggcgcgatggaaaactggggattggtcacctatcgtgaagcgttgctgacgattgatccggacaatacctccctcgaaaccaagcaacgcgtggcaacggtgattgcgcacgaattagcccatcaatggtttggcgatttggtaaccatgaagtggtgggatgatttgtggttgaatgaaagtttcgccaacatgatggaatatgtcgcagtggatgccttgcagcctgattggcatatttgggaggctttccaaacccttgaagcaccaatggccttgcaacgtgatgcaacagatggcgtgcaatcggttcacgtgcaggtggaagatcccgccgaaatcgattccttgtttgacagcgccattgtttatgcaaaaggtgcgcggatgcttgtcatggtgcgagcactgattggcgacgatgcgcttcgggctggcttaaaagcttactttgaagctcacaagtttggcaacgcagccggcgctgatttatggacggcattaggtaaggcgtcgcatctggacgttggcaaaattatgcagtcatggttggagcaaccgggctatccagttgtcactgcagctgtggtggacggcaagctgaccttgtcgcaacagcaattcttcattggtgctggcaaagatgtcggccgccagtggcagatcccgctgaatagcaactatgctgtggcaccccaaatctttgccgagaaaaaggttacgcttggcgactatgcgcaattacgcaaggaaaatggcaaaccattccgcgtcaatgttggcaacaactcgcatttcattgttcagtacgatgaacaattgatgaccgatattctagccagtgtggatcagctgaatgcgattgaccagcggcagattatccaagacctgcggctgctagctgagggtcgtaagaattcatacggcaatattgtgccattgctgccgcggtttgctgcgagccacagcgcgattgtcatggatgctttgttccgcgtagttggcgacttgaagaagtttgtagcccctgattcagacgctgaaaagcagttacaggcattctttgacaagatcagtgctggtcagcttgatcgccttggatggacgccgaaagctgatgaaagcattgatgatcagttgacccgtccatacatcctgagcatggcgttatatgctaagaatccagacgcgattgcgcaaggacatgagttgtttacagctaatcaagcacaattggttgctttgccagctgacatccggatgttcgttttggaaaatgaagtgaagcattttggcaatgcagacttatttgatcagctgctaaaagcctacacgcaaacgacagattccagttataaagctgatattctggcagcgttgaccagcacaactgatccaacgcaaattgccaaattggttgataagtttgaggatgcggacacgattaagccacaggatctgcgttcatggttccgcggggttctgaataaccatgctggcgagcaagctgcgtgggactggattcgcaatgaatggcagtggcttgaaaaaaccgttggcggcgatatggaattcacgacctacatcactgtgatcgccggtgttttccgcacgccggaacgattgacggagttcaaggccttctttgaaccaaagctgcaaacaccgggtctgacgcgggagatcactatggacaccagtgtgattgccagtcgcgtcagcctgattcaagctgaacaacaggctgtgcaagctgctgtggcagaagctgttaagtaaagatttttaatccaatatctgcaaaccgtcactttgaaaataggtggcggtttttctgtgtgacatgcaggaacataacttataactgacgaataagggcgaataactatccgtattgggtagtattgcgaaaaatatcataagttgtttgacttttctgtttcatgaataatttgatggggtatgaagacaccagtgccaaggcggagcagtcgtaggccagatggggctcagccgtgcaaacaacacagcgactgggcttgtcgctgatgttgttgggctcgaagcgccgtcaccgctctagctacgcgtcgccagccccatctgaccggagattgcggagtttggcacggcatggcgtctttagccaattgattttcctgcgattgttggccacgaagataaagcccaacgctcatttcacatttttcatagcttataatggttaattcacaacgttaatttaagaaaaatctaatcctcatctatacaatttcacgggaaagaaaacgggttaaaccggtacactaaaaaatgagtcgctgttgattgatggacaggcggctgtttggagggatttttagtggcagatacaaagaaacaactgcgctggtataacgtggcgttaattgcattcgtctcggtctggggcttaggcaatgtgttcaacaactacgctcagcaaggcctttccgtcgtgacaagctggattttgatcatggcgatttactttgtgccatatgctttgattgttggtcaactcggctccacctttaaggatcaagccggtggggttagctcgtggatcaaagaaaccggtacggtcaggttggcctattatgctgcttggacctattgggttgttcatattccatacttagctcaaaagccgcaagccattctgattgcgttgagctggttgtttaaaggcaacggcaatttcgtgaataccgtctcttcaatgaccgtatccttaatttgtttagcactcttcttgctatttttatggctgtcgtcacgtgggttaaccactttgaatcgcattggcagtatggcaggtacggcgatgttcttgatgtcgattttgtttatcattttggctgtcactgcaccgctcatggtcaaaggcgtgcatgtggccacaccggatatgggcgacattcatacctacttgccgaagtttgatctgaattacttcaccaccatttcgatgctggtttttgcggttggcggtgcggaaaaaatttctccgtacgtcaataacacgaaacatgcggcaaaggaatttccaacggggatgctggtgcttgccgggatggttgccttttgtgccttgctcgggtcatttggcatgggcatgttgtttaacagtaaccagattcccactgatttaatggccaatggaccgtataccgccttcgcaatgctgggcagttattatcatgttggcaatattttcgtcattctctatgccatcgccaacgcactcgcttccatttcggccttagccttttcgattgatgcaccgttgaaaatgctgctaagtgatgctgatccgcattttattccaaagaagctgagtcatctgaataaaaaaggcacgccgatcaatggttactggctgaccgggattttagtcagtttgctgatcattgtgccagcgcttggtatcggcaatatgaacgagctgtataagtggttgttaaatctgaactcagtcgtgatgccattacgctacttgtgggttttccttgcctattatttgcttaataagcatttggaaaaattccaagcagagtacatgtttgttaaaaacaaacatgtgggcatgattattggcggttggtgttttctttttaccgcattggcctgcttgttgggaatgttgccgaaaatcaattatctcaacgatccagggacttggtggttccagatgggcttaaacatcattacgccagttattttcctggcattgggacttattttgccgttcattgcgcgacgggatgaagctcggttactttagtaaataaaaattgatcatagtaaaaaaagtctgtgttggcatgccgaagatttcggttgtcagcacagactttttagttagcggtttttacattgaagttgaatgcatcacttaattgccgcttttttcgcgcagcatgtcactgatgacgatctgattgaccgtgttccaaaccatgtgaccgactgcttcggataagtgttcctcaaccggttgatctttagcggcaggcacaattttcagtgccggcattgcccacaaatgggcacctgcccaaacgcccaggccccacatactgccatagccaagtttaaaaagcggtacgtaatggccggcaacagcataaagcgcaccgaggcttgatgagaagccgaagtgtatgaggaggctgacccaaggaatctgatggtctgaataagtataagttgcatgggtttgtgctgcggtgagaccgtgttgctgcaggaatgtttgcggcggattggttgcgtcacgttcaggtgtccgcggcggcaaaatattttcccaacctaatttgacaagtcctgatactaaaccggcaacggcgccaaccgcggcaagcttcatgacagatgtttttgtttgtgtacgcatgcaatgacctccttgaaaatgtcttgaacacttccattttagaacagcgacaggcatttagcatggtctgatcttgttagttttggctttccgctaaaatggcgcgaacttgattagtgcaccgcagcctttaacgattaatagcgccagactattgacatggtgcatcaggcgcacattactggcgaatgtccgcatgatgggcatgaacaaagtcaatgaagtctttggcggctggggattggtagtgatcttttaaagttgccatataaaaaatacgctgccaagttggaaaactaagcggaatgattttaacgggtagcgttttaagaagtggcatattggggacaacggcgatgccgaagccgtttgcaacgagacccgcgacggcttcatcctcttcaatggcgtacacactgtgtggttggccgccgcattcggcaaaaagctggcggatgatgggcgcgaggccgcttcttttggagaaggtgacttgatcgaaagccaaggtttcactaagttcaatctggttgcgagtagccaagggatgatcagtcggagtgatcacgacgagtgcctgagaagcaattggaaaataggcaatatcttcttgctcgtcaacttttgagcaaaagcaaatatcataatgtttagcgcgtaaaccttgaataatttgtggtgatagcccgttttcgttcgtgaattcaaaacggacatcttgttggctgttttgtaagaattcgcgtaccatgccagggacccagcgtgtgctgagggtacgtaaggcggccagtttaatcaccgtttgctcgttgttttggtgttgcaactgttcaatgccgctatcgaggatgattagcgagtgatccacaatgcgactgaactcgcggccttccgaagttaaaacaacgttgcgtccttgtcgaacaaacaaggcatggatgtaagctgattcctaagacaacttttaagagagggtataatgaataaatcgtctctcaaaaggaaggaatttttacatgccaactcgttacgacaaagaattcaaacaaaacattatcaacctatataagcaaggcgaatcagctgcccaactggccagagaatatggcattggctattcaacagttcataagtggatccagggccaggccaaaactcaatccggtaaatcgccagacgaaatcaaagcgatggaaaagcgactggcttcgctgtctgaggagaacgaaatcctaaaaaaagccctgggcttccttgcgcagaagtaaccaatatctttgattacattcaccaagaaagccatcaccaccaggtaaccaagatgtgccgaatcctcggtgtttccagagctcagtattatcgttatcgatcccccaaaccttcaaaacgccgggccgaagatgcggacttgaaacaacggattctgcggatctttgcggaatttaagcagcgatacggtgttatgaagatccaccatgaattgaatctggaacttcaaccactgcagcttcggtgcagtccacgacggatttcccggctcatgaaggaactggatatccactccgttaccgtcaataagtggaaagcggcttcggcttccaaaaccaaggttgaacagcgtcccaacttgcttaagcaggatttctcgaccactggtttaaatcaaaaatggaccgctgatatgacctatattcaaacgaagcgtaatggctggtgttacttatcaaccatcatggacctgcactcacgacggattatcggctattcgttctcaaaaaagatggctactgatttagtcttaaagacccttgaaagcgcggttaaaaatcgaaccattactggggacctgattatccatacggatttaggatcacagtataccagcgatgattacaatcaacgtttaactgaactacatatccgccactcatacagccgtatgggttgtccgtatgataatgcgccaatggaatcctttcacgcttccctcaaaaaggaatgtgtttatccagtgccggtctttgaagattatgaaactgccgctgccgtcctttttgaatatgtgcatgctttctacaataggaagagaattcatagttcactgggctaccagacccccttacaagttgaaattgcaacacttacgagccaaatggccgcctgatttaatgctttccagggttcaaataagttattaatcgcgattaatgatttatttgagctgtggaaggtaaacgcggttctgaatgtctcttaaaatctgtctcaaatattgacttcaatccagcaagacccagttcggcttcaagaccatgaatggcattgctcaggctgggctgggtgatgtttaactggcgggcagcacgggtatagttctgtgatttggctaatgtaacgaaatatcgcagatgaaaaaggttcattttggtcctcctatgaaggcttaacctgaacgatagcctccagctataagcaccctcattataatgaattagaagtcgcttgtgcaaccgtatacaattcaatttgtaaacaagattgaaaaattaatcacaaatcattttgggaggcactatcatgacacttactcatccaattaccgtcagttcatggacattaggcgaccaatgcaaattcgaagatcgcgttaaagcagccgcaaaagctgggtacgatggcatcggcttacgcgccgaaacctacgtcgatgcgctaaatgaaggcttaacagatcaagggattctcgacattcttgatcagtatcatatcaagtgcaccgaggttgaatacatcgtgcaatggtgtgaagaaccgcggacatacgagcaaaaatataaggagcaaacctgtttccatatgtgtcacttgtttggcgttgaacatatcaacaccggtttgatggaaagctatccagttgacttcacggccaagaagttgcaggaactggcacatcgcgcagctttggctggtaatctcatcattgccctcgaaccgatgccatatagcggcatgccagatttgaagaagacttgggcgattctccaaggcgccggtgctcaaaacgtgatgatgttgttagacatgtggcactgggttcgagcagaccagccgttcgacttgctgacgaaggaacaagctaagcgcgtgatttcaattcaacttgatgatgcttacaagcggccatatgcaaagtccattttgcgtgacgagtcgatgcacgatcgcttagcaccgggaactgggtttgaagatcggactgaaaagtttatcaagatgattaaagaggctggcgtggatccaaaagtgattggcgttgaagtcatttctgatcactacatggccaaagggattgactgggttgccaaatatacttacgacaccacggtgaaaaccttgcaggcggcatggccggaaattttgaaggaaactgttgcgacacactaaaaggagcgtaatttttatggctgattggttaggtttgaaagacaaagttgtcgttgtcactggtgctgttggcggtatgggcactcatttttgcgaagcctttgcagagcatggggcgaagcttgtcttggttgatattaagaaagatgcgattcagacagcagctaagaagttagctgatcaatatggcgttcaaacattagcagtggcaaccgatacgacagatgaagatgaagtcgatgctgcggtgcaagcggttgtggctgagtttggcaaagtggatattctcgtgaacacggccgctatcttgcgtttttcaccgtttgaggatttgcgtttggatgagtggaagacggctgtgaatattaatttgactggttatttcttgatgtcacaacgatttggtcagcaaatgattgcccaacatcatgggacgatggtgcatatttcaacggttgcggctgatttcccagagacatacagcggggcgtacagcacaaccaaagctgcggtcaatatgttatcgaagcaaatggccgctgaatggggacagtttgggattcgcagcaactgtgtcatgccatgtctggtgaagacaccaatgtcggccgatttttacaaggatcctaacgtgttggacggccgtgagcacttagttgccagtcgccggattggcaacttggatgacatcgctaatgctgtcctttacttgagcagtgaccgttccgattacacaaacggtgatgaactgcgagttgatggcgggctgggcatcatgatgcaagatatgattccgaagccgggtggtcggcgtgaatacgcaattaaagcgcaccaagctgccaagtaatttgcaatattgatagaagcaacttgatcgcaccttgggtcaggttcttcttttcaaaatgctcgtgaaaatatgaacttaatggaggcactgaacatggagacgtggatttctggaacgactggtttgttgtgtttgctgggcagtccggttggccattctggctcgccagcaatgtataacttcagttttcaaaaacaaaaaattgatgcagcttatgtggcgtttgacgtgaccaaggagcagatgccagaagcactgaatgccatgcgccttttcaaaatgcgcggcggcaacgtcacgatgccgtgtaaaaatgtagcagcaactttgatggacgagttatcgccagctgccaagatcattggtgcggtgaatgtcgttgtgaatgatgatggcaaattgatcggtcacatcacggatggcatcggatttgttcggaatttgcaggaacacgggattgatatcaaaggcaagcatttggtggtattaggtgctggtggcgccgcgactgccattcaagtccaagcggcgctagatggtgccaaacagattaccatctttaatcggcaggatgaattctattcacgtgctgaatcgactgccaaaaagttggccgaggcagcacctgctgtcaaagtagatgtggttcagttggaaaatactgacaggctcaaagcagcgattgcggacgccgatattcttgtcaacgcaactactgtcggcatgaaaccagacgatggggtttcccttgttgatccgagtttcctacgcgcagatttggtggtggctgacacggtatacaatccgttgaagacaaagttgattgaagatgctgaaaaagctggcgcaaaaacagccccgggtaaaggcatgctactttggcaaggcgcagccggatatcaattgtggactggtcaggacatgccggtgaaggcatatcaggcatttgaagaagagcgtgaaccagaccggtctctggtgtagggaacacgtttaaaaacggaggcaacttgaacgatgaaaaccaaacgtaatcattttttgccgggtgcactggcactgtatttttcctatgcgatgctggggattgcatcttccattctaagtcagtataaggcgcagtttgcttcgaattggggtgcgcaacaactgagcaatggcaccgttgacgtcagcatggtcgtgtcagtgattgcggcgttcgggttaggtcgcttgattgcctatctgtttgccgggccggtgtcggatcattttggccggaaggtttctgggacaattgggatcgggttgtatgtgatcttcttcatcggcatcatcacggtcaatagtttctgggcggcttatctcatcggtattcttaatgggatggcgaactcatttttggacacctgtgtttccccgagtctcatggaaatgtttccggaatcggcgtcaattgccaatcttctgacaaaattcgctgtggtcaccgcgcagtttatcttgccgttcttcattggcggcgttgcggcggctggcctgtcatttcggacgatcttcatcatctgcggcgtggcgctggctgccgatgccattgccattatcgttttcccatttcctaagcgggaaaaaccacagctgaatgcagctggcacgcctgaaaaaatgcatttttcaattgggtctgtggcggccattttaattggcttcactagttcgaccaccttcatggtttggttgaattgcaatcaggaactaggggcggcttacggggttaaaaatccagcaacgctgcaatcgttatacgccgttggtgctgggattgcggtgttgctgacggctcgtctgatcaaagctgggttaaaagaaagcaccgttttgatcctgtatccgacgattgcggtggtcatgttagccttgtgctactttgtgcagacgccggtcattctttacatcggcagctttgtgatcggttatgccgcggctggcggtgtgttgcaacttgccacctcaacgactatcagttttttccccagtcataaaggcatagcgacttcgctggtcatgattgcttcaagtattgcgaactatgcggtgttatccgccgctgccgggttgaccaaggcctttggcgatgcggcaccacggatgatcattcttttgaatattgtcatcacgattgtcggcatcggtttagcactggtcgtgaagacgcaggaaaagcacgtcctagcagtttcacaagtccattagcaaaaaggagttcggaacatgtcattaaaagatgaaattgacggtcacaccgttttagctggcttactggcgcatcctgctggccactcgatgtcgccggcaatgtataacgcaacatttgaaaaacttgggttaaatgatgcttacctgtcctttgatgttgatgcacctgaattggcacacgccttgcaagctatgcgcagcctgcattttctgggtggtaatttgtcgatgccgaataagcaaaaggccataccgttgttggacaaactatcgccggccgcaaaattgatcggtgccgtaaataccattgtcaatgaccacggggtgctgaccggccatatcaccgatggcacaggcttcatgcaagcactgagcaacgatggcttggatattcgcggcgagaaaatgacactggcaggagctggcggtgcggggacagcgattgcgattcaagcagctttggacggtgtccgggaaatcaatatttttaatcgtcgtgatgcttcgtggcaaaatgccgaacgtaatgtggccatcattaatgaccaaacgcaaggccatgcgacattgtttgcactcgatgatcaaccggcgttaaaggctagcatttcggattcagtgatctatgttgatgcgacacccgcggggatgaagccgctagaaactgttagtaatgtgcctgatggcgattggtttacgccagagacgatcgtgtttgatacggtctatgcaccgcgcgaaaccaagcttatgcagctcgctaaagaagccggtgtgaaccacgtgtataacggcattaacatgctgatcaatcaaggcgccgccgccttccatctgtggacaggcttacaaatgccagttgattatattcgcgagacggtgtttggtgaaccggcggcagtcgcgcactcgtaagcaagaagacgaattcaagcagtcagccacgcgcttaaaatcgtcatttcgacaaatcaaaaaagaagataatcttgtaaaaaagccctgatgccagtggcacactgacatcggggctttttgcattccgtggccatgtgccagcgttttctaagctgactgagcatgcggtcacctgctaattgaataaaaagtattcgcgaatatatcaacgtcaaaggttgttattggctttacatttagttagtatataagtactgaaagggaggatactatgaaatacctcattgaattcaaacgatgttggcatcagtcgaacggtcagggtatccacctgatgtgtccgggcaaatgaccacatgtggggtttcttacccacggtcacacgcaaagtttcttttaaggttaattagtcattatgagggaataggaggtgaaccttggaaaaatcgccactcaagatcggtattttgaacgtcatgcatgataaggctgacaccaaaactcggctacagcatgttttgacgcacactgccataccggtcgatttgcatttttactaccccatgacccattacgccggacggacggtgccggaagcggtcagttcaatcctcgatccgctggacattcatgaggtggcgacgatggatgggttcatcatcaccggttcgccgattgaaaccttggaatttgatcaagtgcattatatcgccgaagttcgaaccttgttgaaaacgttaagtcagcatgtccctaatcagctctatctttgctggggtgggatggttgcattgaattacttttttggcatcagcaagctaatcttgccgcataaactttttggcgtttatccgcaaaccattcttgagccgcacccacttttgaagggactcaaaaatgacttcaagtcgccgcatgcacgctatgccgaaatggatgtccgcggtattcatgccgatccgcggctcacgattaacgcgacaacgacgaagggcaaactcttcatggtgaccgaaccgactgatacgcaaactttcgtcttttcacacatcgaatacgatcggtggggattggattcagaatacaagcgtgaagtcgctgctcatccagagatcgactatgttcgcgctaaacattattatcatcacaaaaatgattacgatcatcccaagttcaattggaagaaaacgcaacgaacgatttttgacaattggattcaacatgtcgcggatcatcgcaatgacaatcattaggaaaatcaatcaactaatatggaggcttttaatatggtgacagcagcagataatattaccggtttgattggcaacacccctttgcttaagctaaatcgtgtcgtcccagaagatgcagcagatgtttatgtgaagcttgaattctttaatcccggcggttctgtcaaagaccgaattgccttggccatgattgaagatgccgaatacaagggcgttttgaagccaggcggcaccattgttgaaccaacatctggcaacactggcatcggcttggccttggtcgccgcggctaaaggctaccacctgatcatcacgatgccagaaacgatgagtgttgaacgtcgtgcgttaatgcggggctatggcgccgaattgattctgacaccaggggcggatggcatgccgggtgcgattaaaaaagctcaggcactcagcaaggaaaatggttacttcttgccgatgcagttccaaaatccggctaatccggatgtgcacgagcgcaccaccggtcaagaaatcatccgttcttttgatggcggcaccccagacgccttcgttgctggcgtgggcacaggcggcacgttgaccggggttggccgggcgttgcggaaaatcaacccgcaagtgcaaatttatgcacttgaagcagctgagtcaccaatgctcaaagaagggcacggcggccagcataagatccaaggtatctccgctggcttcatcccagacgttttggataccaacctataccaagacattattgaagtcaccagcgaccaagccatcgacatggctcgtcacgttagccacgaagaaggcttcctgccaggcatctctgccggcgccaatattttcggtgccattgaaattgctaagaaacttggcaaaggcaagagcgtggtaacagtcgcgccggataatggtgaacgatacttgtcaacggacttgtttaagttcgaagattaaaggtacaattttgcagctggcattgatgaaatagaacatgaaatgaaagtggctcggtatctgacgaaggtcagctatcgggccacttttatatggataaaaattatctggaccatttgataaactaattaaatgcaagtatgcatcaactgatgatcacgggcatcagtccgtgattctttctttactttagtcatgacgatcaagatggattcctttgaaaatgacggcttgaatttttggctctttctgcaacagtcgccatgtatagaccagactagctgtggctgacatgatcatgatgttccatgtgcttgaggaaaagttcttccatacgaaaagatctttttcaatctcctcactaagttccgataaaacatccacatgccatcctgatagcaacgcaaacccaagaccataaataaagatcacgatccagcctaccaaatattgccatccgtggcgaatttcaatgataggaaggccattgacatcatgtttttgagaaacgtggatttttagaccagttgtttgaaaccagcccagaatggcaccaatcaagatggttaccccaagtgccaaaaaggtaggccgcttatgagaaactaataatataccggtcactaaggtataagcgggtatgataactaatgttaaccgtgagattctttcgaaacgaaagacatgacgagtgaagaaaaacaatgcagcaatgagtagtattatttgtgacatagggggcctcttattcaggattataaaggtagaacttaattttcaaagtttactgctttgaagatttcgaagcaataggacgatgcaaattattcgagaatggctataatgggacttataagtctccatggtgcaacggatagcataatggtcctcgaaaccacagatccgggttcgaatcccggtggaggcattatttagctttctttaggttattttagctttttaaaaagcttatgtatcagcatttacagcaatttaggtatctttatagttactttgtttttatttttcgggggacaaaaaggggacaaacacaatcatagctgatccatgaataacacggccttatgtgcttcttgttttctctgtgagtctaacaaatgaccatagactttcatcgtaatagtcacgtctgaatgacccaaccgctttgaaatataatagatgtcgacgcctttgctgatcaagtagctgacgtggctatgacgcaacccgtgaaaggtgatctgcttatcttcagggatcccagctttgttctgaatgacgtgcagggctttgttacatgcgctgtctgtaatcacgttgtgacgtggatcacgcataatcatctggtcttcgtcacgatatccagtacgaagataagatgctgcttgttcctgatggatcttattaagaagctcaatgacgctgggcgatatctcaatgtcgcgaactgacgaatcagttttagttggtttgaatcccgttccatacaaatgatcccaagaacgcgtaacgtgaatgacgcagagcttagtatcgatgtcaggccaagttaaagccaacacttcagatattcgcatgccagtcatcgagccaatataaacagcaagcgccccgatattgcggtacgaagcccgttcaatagcaattgctttaaccttagcgaaatcacggctgtctagcacctttactttcccactagagcgcacgcctgatgtcttcgttccaaaggtaaaatcagaaaatagaatgcgttcattgattgccgcttttaccatcccacgaacatagctgttcatcttggtaacgatatctttcgaacgctcacgtggccgctttcgtgtggttttctccttgcgatctttgccagcagcaaaatcgttaataaatttctgccattcgataggtcgaatagaattaagctttcggccatcaaatcggctctttaggtgctttctgaaaagtttgtaacggtatacagtgttgattgacttgccattgattcggtatgcttcagcccattgatcccaataatcaagtaacagaacgtcttgttttgatggatcgccaccacgtttgaggtcatcttctacagcttccgcagcatcttgcgcagatgatttaagccgatacccgccgtgtgaagcaaccagctgtttaccggcggagtccgtatacttaacccggtattcccaatatttgccgcgtttcctaaatgttgccatgcgaattgcctccttttctggtaaaatcgagtatacaaagagccttatgactccgagtatttgttaggcgtctacccgttcactttggtcggtggggtaggcgctttttgcgctatttcctgcctgcttttttcttgttaagtgcctcgtttacgttactgagcggaatatctttgatgaatcgtttttctctaattctagaaaaggggacaacgatcttgtcgtttagttctgttttttctttatcagtgaagacttcggtgtctgaaatgtctaggagaactgagtgctcatattttttgatcggttctccttcaaaatttttccaagttttttcgccaaacttataagagattactgtaattggtttcataggctttaccccctacaatctgtgtggttttttgtgatataattaagtgaatgaaattcatgcaaaaagaaattaggtgagtataaatcatggaaatgcaacaactaatcttagcgggtatccctgggttcttgactttcatatggctcgataagctagatgctattcatttcgatttgccagcaagacaggcagatcgtactatcgctttgattctgatatctatgctgaatgctgctggtggcctcgcaatttaccagcaaatctggggaacagttggtcacagcttctggagtgaatttggccttttcgtagttacgctgattttgtctgttccattagccttcacttactatttcttaattaagctaggaaattcatgcctgatatggatacaagaacaatttcacgttgccaccgtattgccagggtcgccgctagttgaggcattaaaaaataaagaatacagtgaggaaaagcttgtcatcattttcgactttaacgacaagcttatctctagtggttacgccaatcgcctacctggaagcgacgacccaactcaacaaatcgggttgatgacatatggacaggattggaccgtgaaattggcacagaaaaaatatgatgagtctccacaaaacagtgaacaaatcattgacttcgaccgacaattgaaaatttatattatcggaatcaatccttattcttagaagatgccgaatccggcatctttggtttggggggaacagggtctttgtgaactaatttgattgaacgattttgtacatttctgtcgaaaaagaggccggattttttatctggcaaacttttagctttatctgagttgtctttttgcaatttcttttcctccacataatctaattgctcctcgaccacagcggccgggggttttttgtatccagccaacactcagttaaactgctcgacattttgatcatcgtcttgatcactagcgcaagcggttgttgcgccagccaacaaaacaatgagtaagatggcaactatcttttttagcatgatgactcacatcctttacttggtatgtggcacaagccccactttccggcttgcacggagacgccgcttgcgttggggaagggactaaataagaccgaacagtataattattataataattggtattgtgcatcctaaagtcatcgcacaaccgaagtcgctaaaaaatttcccggttttgtcaactgattgtgaaaacttatcagcaccattggcaactttttcccatgaattgattggcataccgttctgatgttcacctggataaattattttagccccgcagttggggcaaaagcgctcgcctttaagctgatgtttacaattcaggcaataaggctttctttttgctgcgtacatttttttgccgacttcagaccattcttcaccggaattattgttgagcgtcttagctggttgctgatcttcggcgataagttttaaagttactgggtctctataagttttgacagtaatagaaccatcgcttcgtgtacttgtttgtttatatgtccccccgtgtatagatacccacagttccactttgtcatttagatacaaggctgagaatgttttgactttgtcgttcggtatctttccaatgaagtacttagtttgcctaatttcggcatatactttcccatcaatatcgactgaaactggttgatttaaggcagcaaacttacttagttgccatatcttattttcaaaagcagtatcaataatttcggagttgccgagaccatcatatgcttgccctgcatcaacctggtcttccggtaacagattcattcattcagaaatctgagagtcttgagtatctaataatgtgcatatttttgtcataatccaacatcaacatctttctacaattaattaatgacttttccgattatactgatatcatctgcttttaccagttggttgcaagctaattcaacaatgaacagtcagtagttttcataaaaccgttcaatgcattgaacggcagaatcctctaaccattgcggtatcgctaaatcattcatgaattggtcaatgtttgctgattcttctggaatgtctgcgaaatacattggaacgataattgatagcgcacgttggttggctccattctctgtacggcttttagtgtattgatttgtgtatcgaagcttaccgttatccccgttgagaatatgtgcacattcatgagctgcttgaaatggcaactcatttgcattcggccatttgttgttaagaataattaggcgagcttctgtatcaaccaaagggccttggtcctcgtgtaaggggatagtcgagcagcctatattgtgatcccaagcatagtcaatcacctgattcaacaagtcctctatatgatcattcatgacgatcacgctttttgctgctattattgcgtcgttccaaaatagcttgaatgatttcccaatcgtcttggcgaacaggctgtccttgataggtaaagatgtttgttcctgacagatcaacaggtttagaaccttcattgtcaggattggggttatccgtattgccaagtaaataatccacagaaacttgaagaacatcagcaactttctgaacattctcggtagatggggtcatctttttccatcgatagatgctgttaatgcctatacctgctttcagagctaatttttggagtgaccaccctcgatttgaagctagtgtttttattctgtcgtaagtactcatgagacgagttctcccggtcatgacgaattatttatcacaagtggtttacaatttatcacgtgtggtttactatgaattcatcaagtaattaagcaaacatcaacaagctaatccatccatgtctttggcgataacggtggataagtagatcatctgtcttatttgctatgccattaatttaccactcgtgataaattaatgcaacaacttgattgattctttaaatgtaagggaggtgagtacatggtaaacgttcagctcaattggactgctaatcgtaatgactggaaaggctacttattacatttgaatttgtcacagctcgacattgcgaaatttctcggtatcagtgatcaggtaatggcaattctggttaaaaagatgactgacggtcagggattaactgctaatcagatcgacaaagaccgttggaagcgagctattgaatacgtcaaatataagcagtcacagcaaaagaagatgacggtatgaacgggctaatcaaacttcatgtggaatagggaggaagataaatgatcaagccgattgatgcaattcgcaatgagcttccagtggttacgtccaaaacgttagatctatttgagtctgctgttagtcaagaactacaaaaaagaaacccaaaagccacattccaagttagcatccttgggatggcggtattgggccttctggtggcaacaaggctagaggaagtctctgacattaacaactgaatcaagcattgtctgtgctgcggacatgataacaaacgcttggacagcatcatcgacactggagggatcgtaaatcttaggggtgtgggctttgggatttcgataaagaaatattacggttctaagaaggttacgtaatccggaatatatgtctctgtcggtttccgttgcaagcatgttgcccttaataacgagtattggttgcttgtccgaaaacacggtgcttaccaaactattgccatctttttgtatgcctgaaagttgctgaattcgattaacgacacccttgcttgcttcgaagatggcgtgaaagtagtcgccttgaagaaattgttcgttgcagaatttcatcactagagggtgaacattgagttctgtaagtcgagcgctaagagtttttaagcgtagctgggcttcagaaaacgtagtcgcggtttttgctgatgcgattcttccactgtcatccaaacaataaccataaaaaataaggcattcatttatctcatatcgtaggcggccccattcttctggctttgaaataaagtcttgaggtcgagcaatgtactggatggctctaaaaaaggggcgactattgtgtgaagcattacactcgtgcctaattgtttcgtctaaacgacgccatttggtagacgctttgaaccattgattgtcagtttgtctttgaagatcataatcgaaaaatccaagcaaagaaaacattttggtgattttgggcccagtcgtatattctcccaagattttagatatattttcaacagctacggcatcaattggtttggacattacattccctccttatgaactattatcccactgacggagggcagcaaactatgaaaattcatgaaagaaggaaacgcattgaatgaaccacaaccaattgaacaaaacggccagcgtgtactgaccaccgaacaacttgcagaattgtacggaacgactgttggagtcgttcaaatgaactttaaacgaaactcgaataagttcattgaaggaaagcacttcttcaagctggaaggggagcaacttcgggcattcaagaacgaaccgacaaattgtgggttcgttgggaaaaatgcaagtgctctatatctctggactcgccgcggcgccgcacgtcactcaaaaatgcttggtacagatcaggcttgggatatgttcgacagtctggaggagaactactttaatccgaaaacacggcttccacagacgccagaagaaaagcttgctttaaccatggaagttgctactcgaactgtaaaacggattgaaaagcttgatggtcgtgtaactgatctggaagagaaggctttgctggcaccaggtgaatataactacatcagcaaacaagtcaatcgagctgttgcaaattatctggacgtacatcactgcaaactcaacgcaaaacagcgcagcctcttttatcgcgatattaaccacggactaaatgactacatcggaatcaagacacgtacacagttacgtaagaaagacttcgataaggctgatgactttatccagaattggacgccatcaacagcaactctcatgaaagcacgcgagatttcattattggaggaccaacaacaggaggctatctaaatgaatgaacgcccaaaggaaaagttaaccaatgtcgttaaagtacaggacaaagatgttgaagaccaagtaactggaatggtcattgatcttctcaaacaaaaaggcttcacatttgccaactttgaatcagttgtagcacgtgtgaagtctcactatcagaacaacgcaactatttagaccaggtgtaacggtattgttcgcctgacccattttcggcaatcagataccaacggccagctccagaaacccgaattgtaactggggactcatcatagtgacctccgaaatatgtaaagtggtcaccacgttggtgagcgttgaagtttgcttgatccaccaagtaaacgttcgcagcgtgcggaagttcgactgtaacagctagagctccgcccggattgtcataataagggacttgcaccatgaagattcacctcctttcggtttcattatccgtcaggaggcgatcacaggaaaggagaaaatgccatgccgttgttgcaggttgttgaagatgatcagatttcaagcaaaaagtatttagcggttgaagaagaagaactggcaaagatgattgaggagaaccaagagttaaaacgcaagctagcagcacgaggcatgtggacgctcaccaccgcaacaagctatgtcgaaggacataacaacacgtgggtagttaacaatatcttgaacgtcccacgcttccacaagttcttgcaagataccgtggtttcatatccaccgcctggcaaaaaggggtatctgtttcatccgaaaccatggctcgacttcttagacaaatggttcccagagatttcaaggtcgcttagagagaagggtaaataatgattggttatttactaattgctggtggcttcggcgtgatcgttggccactgcttaggccacagcggaaattggaggaagtggattgaatagcccggagaccaaattgaacaaaaaatattctccaatatttggcgatggtattagtgtttcggccaatgatgttcaaatggcagttgatggtattgtcgcgactttgagtaggcatacgagcaatcttgcggaagcaaaagcaattttagacttgatagatcttgatcaatacgctgaattaaaactgattaaatagtctttccgcgctcgttatgtaaatggatttcgctacttcatctgtttttgttggtaccggcgtgatgtggtcgaaggacgtggccacatcagcgttaagcaaaaagtcttttgtttcttttttaccaaactcatctgaataagttatggacaaagaaaactttctggtttttaactcaatttctgagtttttgactgaaataacggctgcataggtctggtcgggtgctatcagctgattagaaaataattcaaaagggttgttttcaaactttagttgcccactgtcaatagccggatcagccttgactgataagattgttgctcctgttcggccaaagttcttgatcattaggtaaattattgtagtttgcgaagatctgacaactttaagaaaagaaacggtgtacggcttgtttgcatcacgttctgatttagaacttcgtattaaagcgattgttgatagaacaacagccactatcgaagtcagagcttgtacgacgctggaaaagagttcgtatttattcattctaatcacctcttcgtgattatcgcacaaaagggagcaaacaatatgctctattcacagcttaatcaacgaaataattggcaaaacaaaaaccgctaagcgctagcacacttaacggccaaaaatgaggtttcacattgattgacctcattatatcacagaaagaaatgaggtaaaacaatggccagagaaattggcaagcaacttgaccgtcttgaatcacttgcatacaaagtaagaactgatcagtaccttttggattatttgagagaatgggcagaaaccaagtgcgatctattcagggatgatgattctcacatgaccgatggtgagaagattcaagaccggctgttcctaaaagacaactttaaaaaataaatggatatcttgggtcaaacatcactcgatatgatcaaattcgaagcagacttaatggatgttcgccaaaacattgccgatcaatgctttcatgaaggcggtgtcgatcatgaatgagaagcctggttactatgcaatcatcccagcaggtgtgcgctatgacaaacagctgccacaaggagccaagctcttgtatggcgagatcacggcactcaccaataagaacggttactgctgggcatcgaatgactatttcgcaaagctctattcggttagcatcggcactatcaaaagttggctaaagtgtctcgaagacaattcatatatccgcagagtcatcaaatataaaagtggaagtaaggaggttgaacaaagatttattagtttagcccctcggtcagaaaacttacccccctcggtcagaaaattgacccacccccggtcagaaaactgtccagagaataatacaagtattaataatacaacaacattaggggaaccggagctcattaatttttgggagaaaaacggttttggttttatcagcccaaagaaccgtgaagacctcatatactgggtagatgatttcaagaagattggctcaactgacgagcaggcagttcaggtagtcaaacaggccatgagcaacgcaattgacaataacgtgcgtcgttatagctatgtcaatgccattttaaaaaattgggaatccttaaggcttactagtttagaggcagtgacggcctatgaagcccaacgaacacaacgccaaaagtcaaaatcaacgtcacggcaagcatctacagacgtttatcaaaaccaaggggatgtccaagatgaagacttaccttggtagagaagaggcgtgtgatgagcaatcttgaaactaatcaaggacgcttagcagcgatcgaaacatttgctgaacgttgtcccgattgtggcagcctcttgtatcgcccgaagggattgagcaaagtaaccggtaaaaaaatggccggagtgtgcatgaattgtggctataaacagccacccacggagcctaaaaacgtcacgccagatatggaaaaagaggcccgcaagaaccgcaccgttggatactacctagcttattcggtatttagtacagacgcgattattgcaaaggatttcaacaacttccatacagatggcagccttggacagcagcagttgaaactcttcgctgtcggtttgtctaacaaaatatgccgtaacgaggttgtacacgcattgattatcggtgacacaggagttggcaagtcacatattgctaacggcatattaattgatactcaggccaagaccggttatcgcaaaacatgcctttttattgactggaacgctttaatgcagagactcaagtctggcatgagtgctaatgcacaagatgtgcgaatgaagaacgagaaaattatgcatgagattggcaaggctgatgtggttgtgatcgatgatctaggctccgagcgtggtagtgattttgaccgccagacggctgatgatgttttcagaatgcgggaagacaaagcaactatcgtgacaaccaatttgcacggacaagatctgaataagaggtacggcgagcgaactatgtcccgtatggccaagcacggccaaggaaatagctttggcgttaaaggaaccctagatcagcgaaaagaggcgttgccttgatgaaagaatacgtgattatggacacggagtttaactcaaccagtaatcgagcaattcaaatatcagcagtcagaattcgagacggtctgcacattgcagatcagttcaaccgattcattccatcaccagataaatttgatcagcttcacatcattaggacaagtaacatgcgatacagcgactatttagctttaccaagcctgcagcaaacagtgcgtgactacgtggcctggatgagaactacgattgacattgtggggtggtcgattgaaggcgatgcgggccgcatcagagaaacatttaaaaaggggtcacatggcatccccaagaactggaagtttatcgacatcgcagacatcgttgaaaagcggtatagctttaatgctacgcctccgctgcaaggactggcgaatgttctaggcataccagtaaaccgtactcacaacgcgctagatgactgtttaaggacatttggagttatcaaggcattggagtcacgagacggaaagttattttgaggagaacaagcttgaatttagcaaagaaaaagtaggaggaaatactatggataaattaaatttgaatctgaacgaactggctgatggggccattaaagaaaagttgacaaaggcattggcccaggttgccaataacattcttgatcctaatactgatcagagcaaagcacgaaaagttaccattgcgcttaactttaagcctgacgatagcggagtcgttaagcttacaaccgatgtcaaaacaacgctaataccagacatcagtgtcaccaccaatgtattgcttggacgtggcgaggacggatatatggaaatgaacgagttaaagtcaggtacacgagggcaggaatacttcgacccagatgatagtacgctaaaagacgacaaaggtatcccaattaaagacgataaggtaacagacgcaccgattgatttccgaaaaatcaagaacgccaaggaggccaactaatatgacaacagaagcagatgcacttaaattcacagcagaacaggcagttactgcaaatggtaaacgaattatcgaaacaaaaaatcgtcaatttttgattaatggtaacggtgatataagggaatttagaccaaatgatggagcaaacgaagcgttacaagttcacacattgactgcagttgtcgattatatcgggaaggtcagcgaacgttctgccagtcccttaattgtgcaagtagtcgatgagaacagcgtattcgtattaggagagctcgatgattttggcaaccgggaagtcttgatcaaggccaaggcaatgcatccctgctacccatacggtcaatggctggattcggaatcattcatcatcgcattgcaggcacaattcatgaccactgaggatggcaaagtgttgcttaaatttgttggtaatcttaaagacgaatctgcacagacgatggttgatgacggtgtaagccaagttgcaaccgcacgcagtggtgtggcatccgttggcaaggtagttgtcccgaatccaatctcactacggccatatcgtacatttctggaagttgagcaacaggaaagtgattttgtctttcggatgcatgaaggtccaaaattggcgctctttagtgctgacggtgatgcgtggcggaacacagcaattgatcttgttgccgaataccttagtgagaagcttgtaaaatttggcaagcacgtgacagtacttgcgtaaggagacataacatggctaataaagtggaaagggagtcgaattcgacccccttaaccaagaaacagaaaagctgtcagtattgccaagagccgcataaacctattgaagcagaagatggtagttttctgcgaataggtatgtctggtgggaactgttgggacggagttcatcctgaaaaaataaatggtgcggcaatacacacctgcaccgcagtcggatttgataatgctgaggttgatgaaccgattgcaatcaattattgtccgatgtgcggacgtaggctggaagcaaagcaatgattgccgtcatcttgctcatcgcagttgcttcaatatgggcgtgggctaactgggaaaaaggaaaatgaaatgaattcgttattaataaagctacttatttgcgcggttattactgtagtcatatgtgcatacttcttttggctgctttttgatcattttgttagcaataggcgcagcaagacggttcaaattggcagcacggtcttcatcgtcagaattggcaaaaagcaatatgtatcttacttcagcaaatgtagcaaggaatttaatacatcaagcgaaattgattcatctaaactatttgtgctaaggcatgacgctgaagctgctgcagaagtttctggcgggattgtattaaccttgccaatcaacattgatgatccaaacgaacttaaatattagcaggaataatcctgattcaatgtaaataaaaagcgcgcctgatgagggacgcgctggaggccagacgtacgattgagagtaaatgaaatcaaagattaggagttggcctccaatgacagtatagcaaacgcacatgttgaaagtacatttaaaagcatcaaaaaagcgcgccgggtgttgacgcgctctggaggccaaacgtacacgtgattgatagcaaatggaatcatttaaaaggagttggcctccgtatgcagtataccaaaaagcgcgtcacataagcaacgcgcgggaggtgcttgaatcagattgttcccccaacttataaggttaacacgcataagaaagcatctccaaagatagtatagcaaaagtcgccctggattaacaggacgactcagtctaacaaatcgaattatttgaacagcaggtatatcacaaaaaacaaaagcgcaccacgaaggcacgcttatcctacaaacccaaccaaatcataccataaggagtggacgcagtggtgcgagcaacgagatattttagcccaattgatcatgataaaacaattgaaaacgccaaagaggtcttggggaactactggcatcacaagcggctcgctcaacgcaccaaaatagtgctcagaagtcccgtgatggacggcatgcctaagtcacctagctatggaaataaagccgaggacaagctcgtatcgcacgctgacgagctgtactatatagcgtgctgtgaaggcgctattgaatctatagagaatgaagactaccggatcattttagttgagagctatctgactccaaagacgacacgtaaatccagccttcagttagccgctcacttgcatgttgaccgaacgaccctttggcgacaaacacaagaagctctctatgcttttgctgaaatatgtccgctagtgaaactagatgcaacatccgtgcaacaatgatgcaacaaaaaacacgcttttctgccttattatgttattgtgccaaaggtgagaaacctgagacaccgcgtttttcctccgagcctcagtgatgataaagctgtggcaaggcgtggcaaatggactggctgagatagtcaggcgggttcgattcccgcatgccacattgccaaactaaggcgtaaaatctgaactttggcaacccgacctgataaagaagtgccgcttaaaatatcaggaggtgcgttaaaagactaatgctagaatacccaaatgtgtgatatggcatttgtcgtctatgtctagcggcttggcatagaacgaggccgaagaaacgagatgttgtgggaccaaatcccaccggcctcattgtccagtttagcgaccggacacagcttgcgatgaccccatctgacactgggagagcgagcagcagacatatgaagcacagatatcacctcaatgtagtattccagttcacgctggggtactatttttttgaggtgattagaaatgagctttatttctggatttttgactaaagacttttgctcaattgtggcagatggaagaatgtctcaaggagcaaaaacggttggggaaaactataaaaaatttatgttagccgaatcaaacattttgattgcaactacaggaaacgctcaagttgctgacataataaaggacttcataaagcgattacatgttcaaagcaacggagctcagttaaactggcaactttacgtaaatgtgatccaacagtttgttaaggaaacgttaaaggaggcaaaagacatagatggaaattgtgtaaatcaaattgttgttatttgcggagttaatggtaacaaaatcatggctttggcatttggacaaactgacgcaggttatattcaacgtgagtacttgcctgaggaaaatgagcaaaagttctttactatgactcctccaggtgtgaatccagatgccgtcactaaggagttcatctcgattaccaacaaaatcgagattagaacatatagtgacatagttatagttcaaagcaaattgcaagattatgtggcagaaatcgattcgggaaaatcagttaatacacataagatggggatgggggcgaggatagacggaatcaacggaagatttaaagaatggtcctctggtaattaaactacccgagtttttagactcggccggggatcaatgcccagagatttcgggtgggaaagttgatattatttggctttgacgcttcggcgtctttttatttacacgagcactccgccaaacggtgaggtgctatttttatgcgacggatttacaattcaagtgcaacaaactagtcgaatagaaaagactcatagcctgagtccttgtaaaatggaatcaccataagaccaactacaaggagaactcgactatgagtccgtacacccatcttaccttaaaagaccgtgaatcgatactgcttggtatctctacaggcaaaactcttgataccatcgccaaagagataggtcgttccaagagtacagtcagccgtgaaattgcacgtaacggcggctggcggagctattcggcagccacctctcaggaccgctaccggcgggttcgcttggctagcaggcgtcctcggatcctcgatcgaccggggactcgtgacgctgtcattcgatatatcacggtgctacattggtcgcctgagcagattgccggtcgcttgtcactagaaggcagtcctattcgcatcagctattcgactatctacagaggtatctacctagataatctcggcgttccattgaagagccatggtgctcgcgggctaccaaggctgcttcgacaccgaggcaagacgcgcaaaatcaaaggcaccataaatgaacgccgggggcgcttcaatgacgtgccatcaattcacgaccgaccccggtcggcagaaaatcgcagctggtttggtcactgggaaggcgatacagtacgcggtaaaacaggacactctgcattagtaacattagttgaccgtaaatcacgctatctgctttcgaagcgaacggccaacgcaaaagctgacactgttagagacgtcatgattgagctgcttggtgccttaccagctaaccgagtaagaacagtgactcctgaccgtggaagggagtttgcccggtacagggagctggcagagcgtctgaatacaaaggtcttctttcctgacccacacgcgcctcaacaacgaggaactaacgaaaacaccaacggactgattagagaatactttcccaagaacacagacctagaccttcagagcgaccaggaaattgagacttacattgaacaactgaataatcgaccacgcaaggtcttaggctggaagacgtcatcagaagtcttcatgggtaaaaagttgcacttgagttgacaattcgtcgcaacaaaaaacctccagctacccaggctgaaggcatgcatgagggaagtaaatgtgattgcaagggtggcttgccttgcacgatcagtatagcagatgagtttatcaaatacgtaaagctctggtaccggatttgtacaggtttaaaaaagcaacaaaaaagccgacactttgccggccagttaattagtcttttttatctgtgctgagcttgcttttcacatcatctactgtgtctttaacagcatctttggcatcatcaagcttttccttggctttaccaagtatgccttctgctttgccctgtgtttcgcgagctttatcacctgttactttgccttcaacttcttttgctttaccggagatcttgtccttggtgctgtcgactttaccatctaaactcatagatattacctccttttaacatcaattatcatataagcttatacaaagtgcaacaaaaaagccctcagagaccagtccaagggccaaaaggatgaaaaaacgaaacgtatgtgtgaatagtagcaattgacttggaggagaacggctactgctcacgactacataatagcacattccttgtataagtatactaaaaaagccctcggttgggggccgagagctagaagattagggtagtaccgaggagtgaaaatgagtatttatctggaacaatttaattttagcttattgaaatcttttaagcaacaaaaaagctctcggggccgaatccgagagccacaggaacaacggaagttctttatcagaaagtagagcagcgtcatcaaactgctcacggccattatatttcgggaggcgagtagatgcaatggacagatgaacagatcggtgacattaggaagctcgcctctgaaggctttacaagacgcgagacagctgacaaacttggaattagctatgatgcgcttcagggaaaagcaagacggcttgggatcgagttccagaagccactgaaaaatgaatacgattcagacggcacaaatagggagacaccgtccgctgacagaaaagtcgctcttaatgctgatggtagtcaaacagtcacggccttaatgagactcaagcatgagccaaataaagacccacgaactttgatggagttgtgtggatatgatcctgataagttcgagatggtcttaggcgactacaaagtgtatgagcagcatagtaccgaagacggcacagttccgcagtatagcattcatattcgcgtaaagccgaaacaaggcttatcgataaatgaaatggctgaagcgttcaacgacaaaatcattccggtcaattacggcatgaagaaatcgggcgatcgcaacttagtcatcccattgcctgacctgcattttggctggacaacattcgccgatctaaaagacatggtgagtcaacttagagagataatcatggacggctacaacgagattgtgatcgagcaattgggagatctattccatagtgatcagattcatgtaacacaaacggttagaggaacgcaactagatcacgcaaacatgcgtcaggcattccatgatgctgtgaagttgtttgatcagattattccgctggcaattgaatatagcaatcacgtctcaatgacagcaatttggcaaccgactggcgctgtgcatacttgctagggcatgttggcattatgctcgcacacggagatgtagccaagaacaaactgacaggactttttccatttgagtacaaaaagatattcaatatggcaaaaacatacgaacttcactcaggccactatcatagcgagcggtttaaagatgatcgtggcattatgtggcgccagcttggaacagcaaagccaaatgatccctatgagattaagaatggcttcaccacgggcaaacatctgctgtatgcgttcgtttatgacgacacgcgattgaggtgtacttatgaactcaactaatgcgatgaagcgagtcgggtacggatatgtaagccacacagagcaagcaatcattgagaaactatcgagagaagagaaacacatgcaagcaatcatctacacaaagccacactgccaaaagtgtcggcgaacagtattcaagctgtcacgagtcatgccagtgcaaaccatcacagcagacgcggacgactacgagcggttccgcaagctaggctatcgttcaatgccagtcgtaacaatctacgaagcagacggcacacacgatgaatggtgcgatttaagggttgataagatcaagcagtacacggagggaaacatatgaacggaaaattaatttacttggttgataaggatgagtatatattcataacaactattaattggcaagaatgtcaatggctcctatgctgtaattacggacaaaaatagtttccccagtttacaattcaagtgcaacaccctgacgactagaccataaaggccatgaagacctattcttgttagtgctagctaaacaagaaagcaggaatcttcatgacccactctcagactaacacccacaagcattaccaacaactcagttttagcgaccgtgctacaattcaggcccttcaggctgctggtgacaccgcgaccgtgattgcacagaagcttcatcgcagtaaagcgacaatctcacgagaaatcacgcgtggatctgtaactcagctcgactcgaagcgtcactcgcatcaagtctatcttgcggaaactgcccaagccatgcacgaccgtaaacgcgatagaaccggtcactacgcctttcttaagaccggccgtgcgttcttcaaggctctcgccagggagcttactcgtaagccgcgcgtacacagcgttgatagcttcgtacacttctatcgcgaccagggcaaggcttgcccttcaacgacaactgtgtatcgctacatcgacgccgggctgcttgagctagacaacatgacacttcccaagaagctccgacgccgcatcaaaggctataagaacgcccacaagcgcaagaataagaagatatacggcgactcaatcgagttgcgtcctgcggccgtgaatgaccgcacaggcgtgggacattgggaaggcgacttggtcaaaggtattcgcttagctgatgagccagcattaatgacgctcacagaacggtacagccggactgagatcatcgtcaagattcctgactatcatgcgggcacctgccttaaagccttgcaggacacgatcgacgactacggggccaaggaatttgagagtatcacttttgacaatggttccgagtttgccaagttatcagagattgttggaacccagatttacttcgcacatccgtactcgccttgggagcgtggcacaaacgagaacgccaatggactgcttagggaattcttcccgaaagggaagtctctcagagcagttaccctggttgaaattcaagcagtccaatccgcactgaaccatcgtcccagacgtattctgaactatcttcgcccatgcgattactaccgatgcatggcgtaacagcctagaccactatcaagaattcgttatcatcgttgcacttgccttgaaaattgaggccctattttctttacttaaaagttgtctcaggaatcagcttacatccaaattgtgtacaatctatatcatgagaactaattttagagtacgataaagttgattaacaatttcgctaaaggcgatgatgggatgaaaagcacgacgaaatgggtaacacggtggcccgaacgaattagttacggcttaagtgacgccgccgataatttagtctttcaaatgatgacgacctatttgctattcttttacacggatgtttatggactgacaccaagcgcggtggccattttatttgtcgtggcgcgggtagctgacgttgttgaaagttttgtcatcgggatcatgattgatcacacacattcacggtttggcaagagccgaccgttcttcctctggtattcgttaccttacgttatttttgcggttctcacctttgtgacgcctaacttttcgtataatggtaaattaatctgggcatatgtgacgtatttaggccttggatttctgtatacggctgttaatctgccaatcacgtcaatcttaccaacgatgtcgcagaatactcgtgagttgacgttgttgggtgtcattcgtcaattctttggcagttcggttcaaattgtggtggcggtattcacattacccttggttgcgttcttcggccacggtaatcagcaaaaagggttcttgggcacaatcttcgtgtttagcctgatttcatttcttttgattatcaacacgtttgtccatgttcgcgaacggttcgcgaatcctgaaattgcccatcaaccgttaacaactgtcctaaaaatgttgaaacataatcagccatggatcgttatgtcaatcgtgattctcatgtactggctggtgacggcaattaagaatcagacaaccatttactattttaaatatacggtgggaaacgaaaacctggtaccactagctaacagttttaccctggcagcgttaatcggggtattgctgatcattcgaattaccgaggttcgcagtaagaagcaaacgatgcttcgcggtattttaatggcgctggttggtcaagccgtgattgcggttggggtttataccaaaatactgtggttcttgtttggcggtgtcttgattaactcgattggcaatgggatcattatcggcctcgtctcaatcatgattgctgacacaatccgttatggtgccagcatggggatccaagccgagggaattctggcttcaacggatgactttggcgttaacgtcggccttggtgttggcggcttgattacagctggtttgtttcacttttcgggttacgttgccaatcgaacccagaatgccgcaactctcaccatgattaatttgaattatgtttggattccgttggttatttatgtggggatgtattttgtattgcggctttatgatgaggggcggattgaacgagcaatagaagcaagaaaataagtccgaattatattctaaataatagtttttgatttgctaactaacaccggtgcggtgtgatattattacctttttgcgccaacggttattgcaattggccaaataatcttgcaacctcacttttgaaatgcaatagattgtgagtcgttccagttagcactatactgaaactgagtctaaatctaaaaggagtgctttgcatggctgaaaagtatacagcagaaatcgtgccattgaacgctgagaagattggcaccgcgccgcacggtgccgcgacgttcacgattgatggtgcgcaaatgaagattcatatcgatatgtttgatacacctgctaatgtgcagcattgggaacatttccacggattcccggatggtaagccagcagaaatcgccacagcggcacaagatgctaatggtgacggtttcgttgatctgccagaaacagaatcggtttccggtacaacgatggtgccatttgacgctgaaccggccaagatgcatgtgccaaatgacagttacccagtggctgatgcagaaggtcactatgcttatgacaaactcgttgatctgaaggaattgcagacagcgtttaaagccgctttcggcagtgacgatttgcagctcgataaaagggtcatttatattcatggtgtgccggataccttgaagctaccggctactgttcaaggaactgtcatgaactacgatgcccacgttactttaccaattgcagttgggaaaatcatcaaagcttaaactaattagttgaataaataacctataagtagtcttggaacttactggcaatacgccggctgtttcaaggctacttttgggtttgaagaccttatttagctataaatagagctttttacattatatgtacagattaatacctataatgtcaataagtatgcactgttaaaaatatcttgttaaataacaaacattatcattcctttgcgcggggtcaacttgttaagctggtgttggaagaagagagacgccggaaacaatggaaggaggcgcacagatgcctaagaagttgatccatatcgtcatgttggcgatgttgatgctgacccaggtcggcagcgccgttgtccctgtagccgacaacggtgagacaaacatcaccgaacatgaccgtgcggcgccaaaatccgatccatcctcacaccagaacgatgcgagcggacaagcggcaattagccaagacacaattgagtctgacaagaaacagataagtgcagcaatgagcagttctgagaacctgtctagtatcttttaagaactatcttcaggaaggccaatacaaccatttgaagactgctgttaagggcgcgttcacagtttttccaaagtcgccgacatttgtctagccaactccatgaacgttcaatgatccatcgttgcggtaacaccgtgaacgtatgcaactcgttgcgtttagctaccgtcgtcttagcattcaaaatgagcttcacctgatccgcaaagtcattgccagtgtagccaccatcaaccatgacatgctgaaccagctctaaattttggctagccaaactaaacatagccaatgcacctgaacgatctgatacattagctcgtgtcacgagaatggcttgtggtaaaccattaatatcaaccgccatatgacgcttaatccctgaaatctttttgccgccatcgtagccactatttttcgttaaatcagtggttttaacactttgagcatcaacaatcacaaacgacgttcgggccgatcggccctgtgcaaaacgataggaagcgacagtttttttaaaagcctttctaatagcgaatcagctgtcgggtctggtttatctcgccacatatcgtaatagcggtagacggtatgccattccgggaaatcgtgcggtaattcacgccattgacaccctgtagtaagcgagtaaaggatggcattgaatacgtcataaagatcataacgacgcggtcttgtatgcttacggaagttttctaaatcaggttgtattaacgcaaattgcgctcgagaaatattgcttggataatctggcatgacaaactcctcagtcggttttccacaattctaccagattcagcagatactagacaggttctaataacttggccttgaggtcgagaccgagccgactacttttttcaaggccgatctgctcatcaagcaaaaagatgcgttcattggtacgaacatcttcatagtaccgacggcgaaaagatacagtgccaatgctggtatcgacatggcgttcacgcatatctttgattttaaaaaactgcttccggtaggaagaatccgccaaaacctgatcttgttgttccagcatgacaccaagtaattgacaaagagtctttccaaaacttttttgagtttcgatgactagattggcaaagtctaactttcctgtcagtaaatcaaaggcagagtttccaaatgatgtcatcatttctgtgatgatttgttgtaagatagagttcaagagtgattcctccctagattgcaataataaagttaccacccagaaagaggcttgctcactgcttgaactggggtttgccaacggagacattttctaggtttgttattgataagcgctgtggcttgttgaatatcggtctctgaaacctgatcaaactgtgttcccttcgggaaatagtagcgaagttctcgattgaaccgttcatttgtgccccgttcattcgggtgataggcgtggcaaaagtaaaccggtatccgatagcgctttgtaagcgcctgatcgcaggaaaactctttaccgtgatcaaccgtcactgatcgaaccggacccggaaagtccaccatcagtcttgcaaatcccttgagaacagcattttgtgataagttttcaagcttagttgtcgccattaaacgtgtcacccgatcgacaatggtcaaaacagcagcctttgacccgcgaccaccgcgaactgtatccatctctaaatgtcctttttcggttcgccgattagctgactcactgcgaatctcaattgaggtgcctactgcttggttatagcgcgaccgaaggtcttgtcttcttttatgacgtttaccgtgatcaaagagttggcttggctgaaaatcgacttgtctttgataaatccagtggtaaatcgtgtgtggcgcacagtgaacggcataaccgaccatttcaggggaccaacctaggtttagcttctcagttaccatccgcttcaacttaggcgttaaaatcgagtgccgaccacaacgatgccgacaagtatcggcatgatcctgagctataatggcgcagtaatcaccttcagggcaacggtgaagctcatgcctaatagaaatacgagagcggcctaaggtcgcggcgatgtattgaatcgtgtggtgttgcatcagttctatctgagatcgttcaattaaggttataatggccatgggacctgtccttctctctagatggtatgttatgcaaacaccattttagcaagaacggacaggtcttttttcacattttctgggtggtaactttaattatgcaatctaggcctcctaattgctagctggttgatttgtcattaacattctagcatgagtagggatcgctccctttttgtttctgataatttacccacttaaactttacgctaagccttaaatttcatctgttgtcctgtattatataatgagtctgtaattttgggagaatttaaaatttactttgtaaaaacagactagtcttttctttcgttaagctcaattataattctagacttttaaaggtaatcaatttggtacttgttagttaattgggccaaaaaaggtcctagtttatcattgttcggttgcaaattatctaataatcttaaatactgatgtaactcttcatcggtacattttttttgaaatatccccaaatatgttgatacgttgttgttaatgtttgttttgttggcgaaaccgattcaagtgagtcaatgatgttccctagttcttgtgtcttttgtggcgtccattgattattcttcgccagtaaacgaatgtaatcatattgttgctgtgatttagacattacccaatatttgttgactgcccaaactttttgccaattcatattttatctccattttatgtcattatacgtaaagcatcagagcgttctactgaagtagattgaaaagcttacgctaaactcgtgaatggaccttcatgagttttgtgtctagtttgcttggttaagagacttcaacttcagattgaaagagcacctttcaagaaactttaattgtttatggtggctaccgtgctcacattaacaagtaaagccatccaaaaacacccaaaattaataaaccaatcagatttaacacagtgaacactttaaggaaatgccacaatgactgttcttcgctaaacagcaataattgttttactgcaagcaaatttgcaagggaggccacaattgatcccaatccacctatgttaacacctaggaataaggctggtaagtactttgtaaaattggccagtaagatagcggctggaacgttactaatcgcttggctagtcattaggctagcaatataaacgctctgcggtgtttgcattagctgatttaaccagagagtaatataggagttgtgactaatagcactaacaaaaaggaaaaagcagacgaatgttaagagcaaagcgtaatcaacatgttgaaagacgtgccaatcaattctcaaaccaacaataatagtaacaataataactaatgaaattggtatcaagttaaaaattacgagcataataaacccaatcagggaagttgcaataccaatttgactaacatgaatggtagttgattttgcgggaaccatcgttaaggactttcgtggtacccacaagcttaacgctaccagaagaatcagactggcaatcatcagaggagccgataatttgaaaaaggttaatatatcaatgtgataagatgtcacaaggaacaaattttgaggattcccaataggtgtaaatgaacttccaagatttgccgccatcacgattagagtcaatgggtaagcaattgctcccttctgatgacgatttaatgtcataaaagtgggaactaaagttagaatagcaatgtcattggtcaaaatcattgatccaccgaatgccagtaaaataaaaaattgcgtcatctgtcgagtatgttgtgatttgactaaaagccagtcacttaatgcatctaaaatatgcatggttcgtaataactgaactccaatcataagtgataagagcgttccaatcgtgttccagttaatatcggtaaattgtggcgtcccaatcaaaaaactcagtcctgcgcaaactaaagcagtaataaaaattttgtcgctgatggtacggcgaaaaacggtacccattaggcgctctcctttttcctcatcttgtagtatcagtttgtgtaaaatattttggattgaagtcaatatttgagacagattttaagagacattcagaaccgcgtttaccttccacagctcaaataaatcattaattgcgattaataacttatttgaaccctggaaagcattaaatcaggcggccatttggctcgtaagtgttgcaatttcaacttgtaagggggtctggtagcccagtgaactatgaattctcttcctattgtagaaagcatgcacatattcaaaaaggacggcagcggcagtttcataatcttcaaagaccggcactggataaacacattcctttttgagggaagcgtgaaaggattccattggcgcattatcatacggacaacccttacggctgtatgagtggcggatatgtagctcagttaaacgttgattgtaatcatcgctggtacactgtgatcctaaatccgtatggataatcaggtccccagtaatggttcgatttttaaccgcgctttcaagggtctttaagactaaatcagtagccatcttttttgagaacgaatagccgataatccgtcgtgagtgcaggtccatgatggttgataagtaacaccagccattacgcttcgtttgaatataggtcatatcagcggtccatttttgatttaaaccagtggtcgagaaatcctgcttaagcaagttgggacgctgttcaaccttggttttggaagccgaagccgctttccacttattgacggtaacggagtggatatccagttccttcatgagccgggaaatccgtcgtggactgcaccgaagctgcagtggttgaagttccagattcaattcatggtggatcttcataacaccgtatcgctgcttaaattccgcaaagatccgcagaatccgttgtttcaagtccgcatcttcggcccggcgttttgaaggtttgggggatcgataacgataatactgagctctggaaacaccgaggattcggcacatcttggttacctggtggtgatggctttcttggtgaatgtaatcaaagatattggttacttctgcgcaaggaagcccagggctttttttaggatttcgttctcctcagacagcgaagccagtcgcttttccatcgctttgatttcgtctggcgatttaccggattgagttttggcctggccctggatccacttatgaactgttgaatagccaatgccatattctctggccagttgggcagctgattcgccttgcttatataggttgataatgttttgtttgaattctttgtcgtaacgagttggcatgtaaaaattccttccttttgagagatgatttattcattataccctctcttaaaagttgtctcaggaatcagcttacatccaaactttggaagataggtttcaacgatgccaatgttccatccgatcacgacattaagtctcggctacttttaagcaatcccgataacattattatggatgatgcgttgcacaccgtaaaactagtcaaaactggtatggagctcgatcttggaggaattgcaaagggattcattgctgatcaaattcggtctatttggtttgcctatgggattagggctggaataattaatctcggtggtaatttactatttgttggagaatctccacgacgatctgatggccgatggatagttggtattcaggatcccaataaaggaagaaatattggcattggaacggtcattaaacctgcatgtgcagctgttacaagtggtatctacgaacgatttttaataaaagggggtaaaagatatcatcatttgttggatcctcaaactggatatcctttacaaacccaattggctgctgttactgtatttgctcgtgattctctgcagggtgaattagaagccaagcgattattttttgctggtaagcctattccaggatgggagaaagatcctaataatttaggcgctgtttttatctatcaaaatggcaatacacaaacggtcaaggcctcaattcattaaatctccttaactataagttatcaggttcactgccgttctctaagagtgacgagattgctactctgcaagctaaaaaggaatataattatcctgggtaaggtaaagttaccctttcgagtgattttcctagaaaggaaggtgttcaaatgttgcactatgttggtattgctggaacaaatatacagcggtcaactaatctcaagttacttcaatatatgaagaaacattattctgaggaggcagttattgagattgttgacattagtaatttaccagttttctataaggcttcccaggatcatataccggaagccgtcaacgttatatctggaaagattcggaaggctgatggtgtcattattgccacacctgagtatgatcatgccatacctgctgtgctgagttctgcacttgcttggttctcttatcgtatacacccatttgctggcaaacctgtgatgattgttggtgcatcttatggttcattaggcacttcacgcgctcaggctcaattacggcagattctagattctcctgaattgaaggctagtattatgccaagctctgaattcttagtagggcactcactagaggcatttgatgactccggtaatttaaagaacttacgattaggtgtccagcttaacggtttattctcagacttttccgtctttgttaagttgaccaaacaaatgattcattcacaaaaacaagctaaagaacaaactaaaaacgtcaattggcaggataactaggaggacaattatgaaaattgttgcaattgcaggaagtattgcagatatatcatacaatcggcaattattaacttttatcgctagccactatgcttcacagattgacattgaactactggaaattaagaatataccgatgtttaatgaagataaggatcaaactcaaagtgcagctgtccaatatctagtacataagatcgaatcagctgatggtgttattctagcaactcccgagcacaatcatacaacaagtcctgctatgaaaaacgtcattgaatggttgtcttacaaagtacatccgttaaatcagaaaccagtcttaatagttggtgcttcttggcatacacagggttcctcaagagctcaacttgcacttcgtcaaattatggaatcacccggcgttggggctttggttatgcctagcgatgagtttttattagctgatgccaagaaagccttcgatgagttagggaacttgaaggactcaaagacaattgcttttctcgacactgtaattaacaagtttatacgttggattaatgtactagacgcactacaggaaaagaaaaagcaagaaccttggcgtcaagaggatcttgcaggaaaacatcctgtcgaaacttctattgatattgatatatccgatgattgggtggaaaaggcagctaaactagttaaggcaacgagtgggaatcattatgtccaactgaatcgtggcgtattaacagttgatcaattaaattggttccttaacacgatgcctgtagagttaacttttatggatgataatgatcaatttatttattacaatcattttctcgatcatgacgctatgctcgcaccaagggatccaaaacaggttggcaacactgccgatttagttcaccccaaacgagccgttgagcacgttcaacaagttatttgggctttacgtcaggggcaaaaagagcttatcgcgatgccagtacctggaaataaaataaaccaaaagtacattatgcatttttacaaagctatgcacgatgcagacggacgttatcgtggtgttaacgaatgggtcctggacatttggccaattgtctctgattatctaaggcgtactggacaaaagcttatcaaggatcccgatagtaaacctgatgcaactacaagtgcctcacaaagtgaacctcaaagggtcttatcttctcgagtagaagggaaagacgtacaaacaattaatgacatgaaaacttcaacagctgatgcgatcacaggtgcttccgagacgactaaataagcagtactgacttaactgataagaacatcaatcgaataaagtttggcgctacgtcaactggtattgaagaataaatggctctgcgtcaactgatgttgaagaatatatttatcatttgaggcggttctccatttggggagccgtctttgtcatgttatgccgtgatttggtagattcgtttgaagaagttcagctgattcttgaagccaaaacaggatcgtttgagtgacttgatgaggcggttaaccccttcgatcggaccgttggaataagggctggtgacagcggcgagaacagcgactttgtgtcgcttaagcgtcgcgatcgtcatgtccattgccgtaccgtttggctcgtaagtagtggctggtgaattaggcaacattctggctacctgaaacgtgaatttgatagtgaattaagatggattcctgcttatattttacaaaaatcaaaattggtccattaaaaagccttaatagcatcggctcctatgctgtaattacggacaaaaatagtttgtgcgataattgacagatgaggaatattttatgaccaatacagctattcgctacacccccgaatttaagcaaaccttgattgatcttcatgaaaaaggacactcattcaaagaactacatgaagaatacggtccttccttagacactattcgcaaatgggttcaggcggccactgtcattgccattgatcatcaaggtactgctgtgaccaacgaacagttcaagcaacttcaaaaagaaaatcgccgtttgagggaagaactcgatattttaaaacgagcggcggtgttgctggcaaagcgttgattcatagcggccgaaaggccactctttttatgattcaagatcaattgagccgggggcaccgcatcacagttattctccgagcgttacggatcccttcgagtacctactatgactggttaaagtggcatcctaagtcacgaaatcgccgccgaattaagcttaaagagctggttcaggttctttggcaacgtcgaaaattttacggatacgtgcggattgctaaacgcattcgtaaattacttaaatgccgcttaagtgaccgcacgatttggaaagtcatgcgtgaattggggattcaatcgacaatgtatcgtaaacgctctaaaaagcctaccacaaccactgacatgccacaaaaacctaatttaatgcgacacctagctgacttgtctgaggtcgtgaccaccgatatcacctatattcaactgatcaaccaaaaatgggtttaccttgcaacagcgtatgatccaaaagcgagaaaagtcttagcttggcaagtgggtcaacagatgacacaagacctcgcggtcgcaccgattcaagcgttaattcaccaaggttatacttttaagatggtgcatagcgatatgggtagtcaatataccagtcgtttatttgagacaacattgacagatgcgcacctgcgtcactcatattcgcgcaaaggcaaaccggctgataacgggcggatcgaagcctaccattcgctattgaaacgagaatgggtccggctggagcagatcaactatgaatcaattctagacgtcactgaatccattgctcgttacaacaccttctacaatcatgatcgcgagaccaacggtcgcggtgcttgcaaaagaaagtcagcagctgcataagtaacctttcaataggcgcacagccctggggaaagaccagatgccagggcttgtttgtagtctctcttgcacgttaaacaagattaaacgctgataaaagatctgataatgcgtgaatttaagtgacaaccatacgcattcggcagaaccggacaatttttgtccggaccattgacattcttgccaattgccagtgcaaaggcagcaagaaaacgtgtgcatagctacatctggtatggtgttggtgcaagtagccagttgggattagaagcacttgaccgttatatgcctcgtatcaaagcgcagacaccaaagggaagcatcgttgctttggactacgaagatggtgcttctggcaatatggcagctaatacggatgccattttagctggcatgcggcgcattcgttcagaaggctacacgcccatgtattacagttacaagccatatacattggcacacgtcgattatcagcgtattctgaaagaatttcctaacagcctttggatagctgcttaccgtgattatctgccaactaccaaaccagactacggttattttccaagtatggatggggtagctatttggcagtacacgagtgcatttgggttgtcacaaggcctcgatggtaacattgatctgcttggtgtcaccgataatggatactcgaagcagccagtaacacctatcaccccagcaccaagcaaaccagcgcaatcaaccgcagccactgataccgattatgcgcaaactggtgttttcaagccttccacgactgttaacatccgcactggtgccggcaccggctatgcatccgttggtagctatgcacccggtgaaagtgtgatttatgatcacgtgtatatccgtggcacatatgtttgggcgcgttatctcagctactcaggcaggtatcattatgttgccttgggcgtaaatggtggtgagagctatggttcgcgcagttcaaatgcgcaaacctattcgcacacgtattatacagtccgctctggtgacagcttctggagcattgctaacaagtacggcattagcatgtacacgttagccgccaacaatggcaagtcaatctacagcctgatctatccgggcgagagcctgtacatcaggtaacaaaaaagtcctctgctcgctaacgcgggtggagggcttatttttgttgctttgaagcacgggcataatgctgtaaaataagatacgtaagcaactaaatattttagtcagcctgtaataccttgtcgttctgcctcccttgctcagggaggcttatttttgtgcacagagttgacagaatcgactcaaaaaggcaaaaggtttacatatgccggattaggtaacttactatgagcaaattgtttgcatacccagcatagccatgcgatactgacggtgaaggagcaaaactccaatagctaggagtaaaaagctccttaggagttggcaagctaagctgctacccaccccaagaataatcgcgcatacggactgtatactgttaggaacctgcccccctcggcgggtcttccagataaaagcaattccttgccaactccgccccatcctatatggatggggtttgcgttttgattgcttttgtgcgctaaattatcagccacagcaaggccgttgaaacacgatttaataacttgcttctggatgcttctagatttgtcagtcaaaggggacaaaaaggggacaaggatacctcaaatgttgatacatagctatcagttatgcccggtggaggcattctttaaagaacgtcccgacacaaaaaatcgttgcagcgatgatgcttgcaacgattttttggtgtctcattatttctccgcagccgtcaatgcctgcgccagatcatcaatcaaatcctgctgatcttccaacccaatcgcaattcggacatgttgcggtgtcaggcctgaggtggaccgtttttcttcgggcagtttgaaccatggtaatttgactaaactggagacggtgccgagggagtcggcgaagtcgaagaccttggtgctgttgacgaacttgatgggatcaatgttgtcggcgagtttgatggataggaggccgctggcaccggtggtttcttgttgagctaaggcatagccggggtcgcttttgaggccggggtaataaacatgcgctacgtcgggatgttgttcaagaaattcagcgaccgcctgggcattgctggtttcgcgatccagccggacagcgagcgtggcgatgccgcgacagacaagactacagtcgagcggtgcaagaatcgcgccgatggtattttgcaagaagccaatcttttcactgatttccggactggctgagaccactaagccagcgatgaggtcgccgtggccgccgatgtatttcgtggcgctatgcaggacgatgtcggcaccgagatcaagtggccgttgataataaggggtgaggaacgtgttatcgacgattgtgagcaggttgtgggctttggcaagagcgctaatagccttgacgctgctgactttgagcagtggattggagaacgtctcgaagaaaatcgctttggtctcaggccgaatggctgcttcaactgccgttagatcgcgcgggtcaaccggtgtgaaggtcaggccatgttgagcaaaatactgattgagcaaccgatctgttccgctgtatagtgaatcaccgataataaagtggctgccatccgggaaaatcgcgagaaccgtcgcaatcgctgcaaccccgctggaaaaggcaaaccctgcatcgccattctcgagagtagcgatttgacgttcaagatagtcgcgggttggattgctgctgcgggcatagtcccaatcgctagtgccaccatcaggcgcaaagcggtacatggcgctttgataaactggcggtacgatcgcaccagctttatccgtttgcaattgtggaccatgaactagtttggtattgaattgggtcatatgcccgacctcctcatatgattggttgacaacttatgtcgcgtcacggcctacatatagtcgcgacttttagccaatagttaatgggtaacgcaaagcgattatttagtggttaaatcagcgccaaagtatttctcagacaatttctttaaagtgccatcgcttctaagttcctgaatgcctttggataaggctttctgcaagttaggcgatttcttactgatcattccagccacttcgtcaggcttcacatcgctatctttaagtgtctggctctttaaaccggttgtggaattgctcttagcgtaggcataccaggcggcggtggcgttgatggtgccatctgcacgattttccttaaccagattgagcgaaacagtgaagtcgccagaaggtgtaatgttggcaccgtattttttagctagggcagcatttggggtgccagtgccttcaacaaaagtcttgcctttgatgtcgttcaaacccttaatcgaggtttcatcgctgcgagtgatcaaagcatatcgggagtacatgtacggtgtggtgaagttgtaaactttcttacgctggggtgtttcactgatgttattgagcacgaggtcgaacttttgacttccaaggccagcgatcagggaatcccattgggtaggaacaaacttggctttgacgccgactttcttggctagagccttgccaagatcgacttcgaagccttgcagcttgccatctttgcgataagagaagggcgcataagtgccttcgaggccgatggtcaactcatttttattgataagttcgctcgtgaccgtgcttgttttactgctgtcagctttactactagagcaagctgtcaaaatgaacgcggaaagggcaacaattggtaataagacccacaactttttctttaacattagaatcttccttccataatggtgtttttgttacagctgcgttgtctgcacattgctggtatagcgtgacgtgactttttcaagatagcgctgtccccaagttaagacggtgcagacaacggcataaagcaaagcgaccagtgaatacatcaataatggctgatagttctcagcagcgatctgctgactcacctgaaacatttcgacgatagtgatcgaagccgccagtgaggtgtccttgacgagactgataaaactgtttgatagtggcgggacggccgtgcgtagtgcttgcggaatgataatttcacgcagaaccaagcgccgcggcaagccgactgagtaggcagcctcccattgaccgtgatcaatcgacagtagcgctgctcgaattgtttcagcacaataagcccccgtgttcaacgaaaacgtgatgatgcccgcgatcacaggatcgagtttgataccgtgaggaaaaatgcccggaatgatcagacttggtagtccaaagaagacaatgaacaactgcaccagcaacggggttgaacggaaaagccaaacataaaatgaagcgaagccttttgcaaaggtgatccaaaagccttttcgtaccgagatgcgcgtcagtgccgtgatcaatgcaatgatgaggccaatcgcgaatgaaactagcgcgattgggatcgtgtatttgattcccgcagccgccatttgtggaacggcatcggcaacaattttccacatactttttcctccttgaatcgactcacacaggcgtgataggttgattgaagtgggttgcgcgcgtccctgatcgtgctcagaaatgcgatcacaggcgtagaaacctgcccataaacgtgcctgtgatcgctctacaaaaaaatccgcccaagtctattgtgacaatagacaaggacggattttccgcgttaccaccttgattaaccgatcgaaatcgattctctctaagtacttcgcaagtttgcgttataccctgactcagtaacgggagtgcccgtcagttgcttgcaagatgtgttcgcaactgaatgcttcaaaagaccatcttcgccagtgcccgatcattgtctttcaccaaatgacaactcgctgcggaccttcgactggttactcatcttttcgcctgtgtgatattgacatcacattaggctaaaaaatgattgttgtcaatagtgagtgtagaaggtttctaaccgcgcctgcttgcgctcttttaaacgcgtgcacaggcgcagaaacctgcacataaggacctcaagcacaatgacaaagtacggtcatcgcacttgaggccacttatgctccggtttctaaccgcgcctgcttacgctctccgcctaaagtccagtgactttccaaaataagtgcggtatatttaacgcggagtgaataattgaaacgctttaaggcttcaaggagggcaatatgaaaaaagcatgggtatacgggttagctgccaggcttggcttgggtgtatcagcggtgattgctaatcaggcatcagcttccgcagcaacagtgccgattgtgattcaatcagcgacatcgaaatgcgacactggttctgcgccggatcatggggcatcacaatcagcgatcgtaccaccgcttgctgacaacaaggttgaagtaccaattgtcacggtttcaagcgatgatgatcaaaaggcgggcaataccagcagtgcggatagttcatcggtttcatcgagtcagcaaaatggggcagcaacatcggacacaggtgcggaaactgtgggcagtcaagcacctgtcacaaacgggaatgttacatcgtcagcaaccgcgcagcaagatgatcgtgatgcacacccgtcagtttctgaaccaatgattaaaacggcacaagaagttaatgcgacagaagcaagctcgtctaaagcaccgacgagtaaagagcgggatgaacaggcaattgttgctgcagcgcaagcggcaacacatgataatgtgaaatcaggccacacaatatctgtggtcccggagagtgtgacttcttttatcggttcaacccataagcagccgcagaatgcttttgagattatttggcaggcgttgattgagactgttcagatgcgacagcaatgcccaacaaatctgattcaaaatttagtgctggggatgccgcagccaaattttgactttgtgcaatcgacatttatcgcaacgaaaagggaactcagcaaggcgttttcttcgcctgtttttgggaagtcccttcaactagatagcctgtcgccgttcaatcaggtttttggcaagatgatcaacttgatcgatcaagtgttgttgacacatcttgttttcccagattaacttacttaaatagttccgtgatggtgaatgaaaggcgactaaatttgtcaacgggttcttcttagtcagaggggagcccgttttttgatggcactgacacgttttttgaatggccccaaaacttgatgaccgtaaaaaaagcctatctcttcagtattcgttacaaacacgaagaggcatagacttttcagaaataacagctgatcaagcggtatgcgcgattgtcaggcatttccggcttttgggttgatcggctattgttttggtcacttctaattttcttcggcacctaatttggcgacagcaacggcttttcgaactttgaccgcgtgtgccacgaggccgacagccagaccaacaccagccggaactaaccagccaaggcccatgccagcaaacggcaggaaatgtaattggaaactgtgcaatgccagaccaagcgcactttgactgacaaaggctggaaaggcagcgaacatgtcgaggacggctgggactgcggtgaagccgacgacgaaccgatacaccagtggatcatgatggaatgccttgccgaaaacggaaaggagaatcaataccattgagaaaggatagaggaacatcagcatcgggacagaccaagcgatgatttgctccaaaccaaagttcgccgttaagaaggatagaaaactggtcagtgccaaccagacacgataactgacctttggaaaatgacgatggaaatcttgcgcaaatgcagcaaccaagccaactgcagtggtgaggcaggtcaacgtcaacaatgttgccagaaccgcatgaccagcagcgccaaagtaataggttacaacttggttaaaagcagtcccaccttcagggctaagtttgaagtgagccaatgacatgctgccgagcaggattaaggcaacatagatcagaccaatccagctagttgccatcacgccggcttttgcagtcgacttggccacatcgtcatcattttttaagccgagaccgcgaactgctgtgaccacggtaacgccaaaggctaaggcagccaaagcatccatcgtgttgtacccttgtaggaaaccattcatgaagctggcatttttataagctgctgtgacagtttgggttgctggatttcccattggatgggagaaaccaataaagaagacgaagaatagcaagacaaggaaaactggattgagaattttgccaacagccgttgtgattttgcgttccttgtaggataggaaaaaggcggcggcaaagaataaggccgagaagaccagcagaccaacctgcgcccacgcttttggcagcatcggcaagacgccggttgtaaaggacacggttgcggtccgcggtgtaccgaacatcgggccaatggtagcgtgaattaaaaccatgaaagcaagagcgaaaaagcggccaagtggacgaccaatatcatacacaccttctgcatgcgtagcggcaatcgccaacacaccgagcagcggcaatgcaaccgctgtgactaagaagccaagcattgctggaaaccagttggcaccagcgagttgaccgaggtgcagtggaaaaattaaattgccagcgccgaagaagagaccgaacaaaagtgatgcaatgacgacataatcgcgggttttgagcttcttttcagataattccatttgagttcctccagtgtttttagatgtatcattgattcattaatttggcagctaatgtggctaatgtcagattccaattgcatcacatccttcaatggtttgagttacatgtttgctaggcgaaaattcaagcttggggaagcgcttctgctcgcgctccgctataacgcgctcgccagcccagaaacctgcgtgtaaggaccttggtcgcaatggccaaagtacggccatcacgcccaaggccgcttacactccggtttctaaccgggctgactcacgctcacacaaaaaagtcgcccttagatttttctaagggcgactttgcgcggtaccaccttaattcaccaaagccagctgcgccttggtcttcatcgcatacggtccaatgacgatatgctagcactgtaatgggtgcccccatgacacgttactgaagttcggtgtcctgcttgaaagggatattcgccatatcatgaatgcttcctcacaccaaccgaagctcgctgtattcacagacacgggtacttgtctttcgcgttgcatttatatttgatttttagtttagcatggattgttttcttgtcaataactaattgaaatttaatcaaaaaaagcttttgtccgatttgcgtaaaaaatggcacaagaagtttttttcacaatgttgaagctgattgaataaataaacttatttgataaatcaatattagctgaaacctgcaagcctatcgagttaattatattgatcattattgggtcagttaacgagtttttaagaaaaatgattttttaattttaaatatgacttgaatggaaagcgcagagtgattaaagcaaaaatgtgaaaccgctaacaatcactatataaataactgagtaaatcacaagcgctaatgtggtgcataaagagctatttatatgccataatactatcagtaggagaaagttgaaggtgagtcatagacaaagcccaatattaaagggatctgcgccagctctaattcattgattcttctcgctcaatcctgtattatgagtagtatagagagagataaatgaatttcaataacgatatggaggcaaaaagtgatgaaaaaagttaactatattgcagccggaatttccgcattaacaattgctgggctcctgttgccaactggtcaggttttcgctgctgatattaacaaaacatctgtagctgaagttaacattcagggtggaccaattaccttagatcaagtgcccgatctaaactttggaactattgagattgataagttaattgctggtgaggttagccaaccgcttgttgataataccgttccagttggtcccgttaaaactgccgctgatcccaaggacggtaatgcaaccggtgatttaagcgtcaccgataaccgcggtacgaacgttggttgggagctgacagcgcaacttggcgatatgaaaaatgcaggtggtaaggcattggcgggttcaatgatccttaaagggaccgatattaagactgataatgtaagccttaatgcgattaacccaggcgccgctcttccagaattagtcattggcggcgctgcagtgtctgtctggaaagctaatgctgccactggcacagacgatggtcagggacaggggaaaaacactgctgtcatcaaaaatgcgggtggcacgacccttaaactgaaacagaatttgacaccaacagcaggacaataccaagcggccatcacctggactttagccgacgcacctaagtaatctatggcacctaaactaaggggcagcggtcattcgctgcccttttcatgactgtgggggcggaaccatgaaaaagaaaatcattttcagcctgttggcaattctgagcttgttgtggttcggcggtgcccattaggttcaggcagctgaaggcgctggctttactatcagcccggcgttgccgcaaaatcaaattgatcaatcaacctattttaatttgctggtaaaacccggcgagacccagcggctgttgatttatgttaagaacacaacaaaaagtgctaaaaagttgaaggtcagtgcggtcagtgcgttcactcaaagtaatggtacgttaggctattacccaaataaacacacagacaagtccgctgagtacactttttccgggctgacggaagcgcctaaaacaattgatgttggtgctgaggcacaagtgccagtcacgtttgatgtgaagattcctgaaaagggtttcaccggtcaaattctcggcagtttatacgttgaagatcccacggtgcataaaagcggcggcagtggcatggcgattaacaacaagttcgccatgcttgtcggagttgttttgtagacttcggaggccaaggtggcaccagaattgaagctgatggatgtcaaaccgggcactcaggataatcaggccagcgtcttagccaccattcagaatatcaaacctcgtttatttggtgagatgacacttgatggcaaagtttatcggcaaggctcaaaagatccttacctgacacgttcggaaaaagggtggtcatttgcgccaaactcgcattttgactacgccattttctccaaagaggcactggcaccgggcacctatacgcttgatttaacagtcaaaggtgctgacaaaacttggcattggcgccggaactttacgattacgcagcagcaggcggatgtcattgaagaaaaactgggacgtgccccacaaaccccttggctgtggattatcattgcgatcatactggcgcttgtgatcttgatcctgctgtggttaatttggcgccaacgacgcaaaaggagggagaccgatgagacgaaacaagcctagtttttggatcatgctgctcatgacaatgaatctcatggtcggcgttggcgcgaaggcgcagcaagttcaggcagacacttctgttgcacaagttgaacttgttggtgaacttccgtcaacgaaccctgatcctaacccaacgccaacccctgatccgacaccaacgccagaaccggttgatcatcaaaccactgatcagcatggtcaagccacgccgctaacccatacaggctatctgccgcaaactggcaatgctgttcaactttggtacgtggtcattggggttgaacttctgattattgtcattttaggcatcgtgttactacgcggccgatcacggcagggaggtaaaaaatgaaaaagaaaacctttatcatgatttgcctcacggtgatcttcggcatggtgcttggtccgctgcagtcagtggctgcagcggaggcaacttggccgagtggcacgtatcccgctccagcaacaggaagttttacccgattgaatggtctttttgatcgggtgtctacagattcgagcccaattaaaagcggcacagatgaagtcggctttgaactgaatgcggatcaagcaagcaaggtcggttctgtttggagcaagacgccttttgttgatctaaacaaagataaattcacattggacatgcaaatttatttaggtaataaaactggtggtgcagacgggcttgcttttgcgttggccggtaccaaacccacaaaatcaggaaatggtggtgcatcattgggggtttggggcttgccagaaatgcaaggcggtagttcagtaggtgttgccgcaacaggaaccctaaacagttttgctattgtggtggatactaaaaagagcgttgaggcattcaaaagtgggatggacaaaaatgttggctatcccgctttcttctcaagtgatcagtatatcggttctggctatccgagtcaggctagcatgtataaaatcggaatcccatattggcagacggagttagtattcactggttctggaactggactcagaaattttgctgatcccttaagcactcgtgtcactaatggaaattggcaaaatttggttgttagttgggcaaagacatcaagtggcggtaccttaacttatcagataaaaggtaccggactcacgactgttagtcgctcgataacttggacgaatgcacagattcaatcaatcttcggtagcacgaaacttttcttgggtttcacgagcgcgacgggggccgcatcagagccccacgttgttggcatcaagagcttagctgacttcaatacagttagcggaacggttaccttgaaacaaggtaatgatcctgtcactattgataaacccttaaacatcggcgataagttgatgtatgagtacgcgcttgatgtgaataatattgatggtcgtccgtggaaggctactaatatcgccttgccaaaaggagaatatctcgattacttgaattcaggcggagctccagcaaaacccggcgataatttggacgttaatgtgacgatcggttctgagacgaagacagcacatgcgattgttcaaagcgacaatctcttggccgttattaccgatatgcctgaatttcctaacaacacagaatcgcttgttaaatttagcctgcctgtgcaggtgcaaaagcataacgctaccaccattaagtatgtgactcatgctgcaggtaatctgactggtggtgcaccaagtaatagttacaaattaacaaacacggttgataattccgacagcgttaaatatagtattgccgcctttgatccgggcgaactgtccttactagttgtgccaaacttttattttcaaaaacttaaagtgggggaaccggagccagttgatccggaagtagcagatgttattgcaggtattcctggtcaaggcaaactgaattctagctcagaaatagcacccgataaatggctcatcaataactcacagaatgtctctgcacctggcaagtaccttgaagtcaaagacacacgtccagataaaccaggctggcgtttgtcgatgaaactgtcaccattcacacatgctgatgattatgttcttggcgataatggcgacaagggcggtgggaaagctgagatggtgctgtttgatgtcaatagccaaacagatttcgaagtgactaggattaaggataataaccaagatagtgttgtgaaggtaatgcaggcggggacgaccgaaccaaattggtcacttggtgatgccgcatccagtacgcaagcactgctgtctgtacagagaacgccttctgtacatgcgggcaagtacagttccactgcaacatggacgttagcaaacgccccgcagtaatagcgaaataagtcaaaaaattcaagatctccttgaaatgaagtaaccatgagaatatgatgtgcttatctcttagattaaaggcaagtcagtcatgagcacagacaaaggggtcttaggatgaagaagaatcggatggtttcgcacacactcatcaccatggcggtagcggttttggccgtgatttccgagatgccaattcatgttttgatcgccggattcagcagattaggctaatgccattaacaggtgtcagctgactgtttaatgagctatataaggaagtcgcttcttttcggagaagcggctttttgatttgcccagaataaagttgcgagtgtgaagatcgtccaagtagcaaagcaaaggaaaattgcttgccatggtcaatctttcgtgtctagatcaaacctagattgcaataataaagttaccacctagaaagaggcttgctcactgcttgaactggggtttgccaacggagacattttctaggtttgttattgataagcgctgtggcttgttgaatatcggtctctgaaacctgatcaaactgtgttcccttcgggaaatagtagcgaagttctcgattgaaccgttcatttgtgccccgttcattcgggtgataggcgtggcaaaagtaaaccggtatccgatagcgctttgtaagcgcctgatcgcaggaaaactctttaccgtgatcaaccgtcactgatcgaaccggacccggaaagtccaccatcagtcttgcaaaacccttgagaacagcattttgtgataagttttcaagcttagttgtcgccattaaacgtgtgacccgatcgacaatggtcaaaacagcagcctttgacccgcgaccaccgcgaactgtatccatctctaaatgtcctttttcggttcgccgattagctgactcactgcgaatctcaattgaggtgcctactgcttggttatagcgcgaccgaaggtcttgtcttcttttatgacgtttaccgtgatcaaagagttggcttggctgaaaatcgacttgtctttgataaatccagtggtaaatcgtgtgtggcgcacagtgaacggcataaccgaccatttcaggggaccaacctaggtttagcttctcagttaccatccgcttcaacttaggcgttaaaatcgagtgccgaccacaacgatgccgacaagtatcggcatgatcctgagctataatggcgcagtaatcaccttcagggcaacggtgaagctcatgcctaatagaaatacgagagcggcctaaggtcgcggcgatgtattgaatcgtgtggtgttgcatcagttctatctgagatcgttcaattaaggttataatggccatgggacctgtccttctctctagatggtatgttatgcaaacaccattttagcaagaacggacaggtcttttttcacattttctgggtggtaactttaattatgcaatctaggcaaatgtttcagtgcaaactagaagtcttataagcctgaaaaactgtaaaaaagtagcatactatcctaaaacgcccatgaggtcaaaaaatcatattattaattcgaattattgcttaaaggctgataatacgcgacttgcaatcgtgatttataagtttaataaatggccatttttgagatggagccaccgtttgaaaatttattatcactgtgtaaataacgagtaattattaatttggatcatctgttatgtcggaatgcatagcatatctaacgaaacagaaacgagaaaaataacgttgaatacgtttacttaatagagaattgtggttatatacggattatatagttgatatataaaaaatattcgtatactattagtattgtaataaggaattaaaacatattttaaaaacaggaggataaaataatgaaaatagttaactacatgtctgctggtttaatagcaatgacacttgcaggggttatgctgccaatcacaagtgtctttgccgcagacgaaccaatcaagaaaacctctgttggtgaagttcgagttggggttgatccagataatcctgatcctaacaatccggacaatcctgatgggtctaaggatattttgtcattggtcaaggtgccagatctgaagttcaagagtgtcagtgttgagcaactggcaactgggcagcaaacattgccgctcacaagcaatacagttactgacaaaccggttaagaacgaaccagcaggaaatgccagcgatgggaataatcaaggtttgttaaatatcactgattatcgcggcaatggtgctggttggaagttagaagctcaggcgggcgaactcaagaatgcggctggacaaaaactggctggtagtcttttgctggctggggttgcgaaaaccgacgagactgataataatccaactgctattagtcaggctgagttggtcttggaaggcagtggggtgcaggtatggaatgccgcaagtggtcaaggccaaggccgcaacacaggtgttttcacttcggcagataccgtgttgaagctttcccaaaatacagcggcatacggcggcaagtatcaaacggctatcacttggacgctgaccaacgcaccagcttaatggatcgcatatcaccaaagagggggggcagcgatcgaacgctgacccctttttgaagaaaagcgttttgggtcagttatgggtgatgcgatactactgagttaatcagatgaagttctcggaatgacaaacgtagggaaaagggggagaccgatgacacgaagtatatggcgctttttgatcagtttgatcattgtgttcggcgtcctcggtgaagggatcatggccgctcaccaagtgcgagcggcaacctccatcggtgaagtcgtcgtgattgacgatcggccaaaacccgacaaggatcataatgcaccaggaacagaagtatcaaaaccaaaggaagagccttcggtaccgccacgccaacaggttgatcgtttgccacagaccagcgaaggcggacaaacctggtatccgctgatcggttttgcactcctgatgatgagcagtttgcgtcttcaactgcggtttaaacgaaaagacaggggggacgatgatgaaaatcgtgactaatttcgccatcgcttttgtcaccctgatgcttgcaggtttcgtcgggccgcaccagtcagttatggccgcagatgatctaggcccaaaaaagtccagtgctcaattgacggttgatgctggcaatatcatgattcagcaggtgccggatttgaattttggtggcatttctgttcatgaaatcgtgagtgggtcctttcagcggcatccgttgaaaagcaatctggtgaatccgggaccgattaagacggcaacaaatgccaatgacggcaatgcgactggactattacaaattgccgattatcggggcaccggggctgggtggcggcttgaagcaaaaatggacgcgctgacggatggcaaagggcatttcttggcggggtatgttgatttggttgggtcacagcttaccgcgagcaatcccgatatcaacccgattaatcctgccggcagcaatgtgccgcggctgaattttgccaaagacaacacctctgtgagttcaaccgttgtttggcaggccgatgctgagacgggtactaagtcaggacaaggacaaggcaataaccagaccacaattggtaccagaacggcattgacgttagttgcaacgaacaccaacgtcactattgccaaaggcaggtatcaaggcgctattacttggaccctgagcaatgcaccaaaaggttaggccatggtaaggattaacttttggaggagccagaagtgagatgggtggacatggttgcttgctgaagtctgtagcgaaaaaatacggtgcaattgaacttcaagtgcgcttaggggtaatggcaccttgcaaccggactacttgcgaaaggaggcgttctgatgaaaaaacgatgctatctgttagcttgtctcggcatgctgttgtgtaccctgctggcgcctgtgacgagtgttggcgcggccgtcacgtggccgacgacttccggctatccagcaccgccgtcatttggtgacgtggacggcctcttttcaccaacgatgggtgactcaagtttattgacggatccgaccagcggacatgcagtcgggcttgagattaacaaggatcaagcaaatcggtcaggagcaatttggagcaaggccccaatgtttgatttggataaggatagttcgtatacgatgtacttttatatggaaaacaagccaaaaagtggtgaaggcatgggctttgttcttgctgcgaaaccagcggcgccgaaaaagattgatactggctcattaggcgtttggggggtggatcatcttcctcctaatagcaagccacaagaagtcgccgatacagcgttacccaatagttttgcaatggtggtggatacacgaaaaaatggtacaggagatccgggtggttatgaacaactgagtgattttcagtcttattactttggtactggttatccgggacaagcaaatatgtatcggatcgactatccttattggatgacttggctgtattttaagatcaacaatccatctgaacaataccgctttggacttggaacacagaagaatttgtatgaaacgccagccaatggcaaatggcataaactacaacttgattggaaaaaagataatctcggtggcggtacattaacggcacaaatgacgattactcgcgcgagtaagccagactacgccacagaggtcatcaagtggaccaaaaatgatattcaaaaatacttttctcaaggttcaaccgatcccgcgccgagaaaattgtatctagggtttaccgggacgacaagtgacgttttcgaaccgcatgtcgtcgcaaccggcgccatgcctgaagccgcgaccgtgaatggtacagtcgccttgatgcgcggagcggaaacggtggatgccaccacccatctaaaagtggacgatgtgctgcactatgattacaccgtgaacgtgaaggcaaccagtcaggcaccctggccggaaagcgggacagcaacgatgaacgtgccaaaaggaaaatattttgactatctgaaggctgatgggacgcccgccaaaccgggcgatacgttgcccatcaaagtcacgataggtaattcggattatcaggcccaaggaaaagttcaaccggatggcaatcagattgctgtcaccaatatgccccagattccaaaaggagcaacggcaacggtgaagttttcactgccggccaaagtcaaacatcatggcctgctggaaacgacaccggttcaggacaaaccaattgggaccatcacaggggatggccagacttatgatctgaagacacctgcgggcaaagattttctcgcttatattcttgatcccgaaacaggtgaactcgtgctggagaaagtgccgagttttgtcttcgaattgaaaaatggtcaaaccggttatcgtaatccgaccgtgatggagatggtaaagggactgccaacgccaacgaccactaattgggatcaggcgaatgcagatcagtggctgacgaatcagcaaggccgcgaaccgaccaattcgacaggcaaggtgttgagcgtgaaagatacgcggccaaccaagcaaggctggcatttgacgatgcaactatcgccttttacattaactgataatagctatgtgctaggcgataatgggaacaaattaggcggcaaggcaaggttggttctgacagatcagacagcgcgaattgcggctatcaaggataataacaacgcgacaccggtgaaaaatatggcggctggtgggacagattggtcgctaggcactcaaaccggtaatgtagcggcctacctaggcattgaaccaacagcgactgctaaggctggccaatatcaggccacggctacttggttgttgacgaatgcgccggaatagtaaggcgctggaggtgcaccaaaaaatggttccgaaacataaggctgacttatgtttcggaaccatttttacttagctatgatttagttttctgtgaaaattgccgagttaatcgttgctgaacgtggtgaattttgttaaacggcaatgcttgaaggagtgtgttcaaaatgattaagatgccgcctagccactcggccggtccgaacgcgatgtgcaagcgggtgacggctagagtggtggcagtcaacggttcgaaggcactcaacatgcccgtggcgactggcgagatgtagttgaggctgcccaacaccagcaagtaagcgaacatcgtaccgaatacgatcacgaaggcaatggcaccaaaatcgggtaaagttagtagcggattgggatgcagcacgtattgcggtaaaaatggcaagctccccaagagcatggaccaaccggtgaccgctcgagcgtcatatttggccagtaacgtgcgcggaagcaacgtgtatagcgcctgactgacacctgccataatgccccagaaaacagcggccggcgcaagacttaaccctgtcagatgaccgcgggtaaccagcaaataggtgccaattagcgccaaagtgatactgacaaagtcaattcgccgcggcatttggtgagttgcaaatgccacataaagcaagatgaaaaccggcccaaggaactgcaaaatcgttgctgttgcagcattacctgcattaatcgctaaaaagtaggttagttgtgacggtaccatgcccaaaaaggcgaacacgatcattagtatagcatcgtggcggtttttccaaattgcaaggaacatccgcggttcttgcacgccgctccaaagcaaaagtaggagaccagcgaaaaacaagcgaatgccaaccagccacagcggctttactcccgcatcggtaaatagtgtttgagtgaaaataccgctggcaccccaaaaaatagccccaataacggcgaaagaaacaccttttagtttttggttggtatggcgagcgagataagcttcagtgcgtggcatggcgggatcctttcgaagtaagactgtccaagccattctacgcaaaaaaaactagggttggctagttcgtgcaatatcgatcaagcttcctgatggcgtgtcttgaagttgcgatgcaagtgcctaaaaagaggcagccattcattgaagaatgactgcctctttgactcattcctgagtcgtcttaatttttaattcgtagcgcaggttggttcgatagaaatgcccaagcagcatgcctagcgttagtcctaagacaatgagaccgagcgggaaaagccaaccaccgaggaacccgccgatgccgatcacaatcatggcgatgatgacgccaaaaaagatactggcaaagccaagcgcgccaccgctgaagttggcattagctgaatacacactagcaaatggaaattgactgccaaccagcggccatcccatcattaacgtcatgccataggtgaaaatgatcacggcaatgccggccaacaaggcatcaaagccgccaagcgcagtggtcaaaatggtaatgagcaatagcggtggtaagaataatcgggcgaacatggccttgactaccccgcgcagtaacaacccgtgggtcgtaaaaggcacatactggaagattgccatggcttgaggttgactcgaaaaccgcagattaaccaaagcgggagccaacgccacaatgacgccgatgccagcgtaggcaataaaatgcttcgccgagctaaatggcatgtcgcgcagtccaccgccaacaaagatcagcggtagaatgatgccataagccaactgcggatagacccgcagtttataatcgcgttcgctgcctagcacacgccaccctaaagtgaagtatgtccgttcttcaccaggacgagtcagcagggcactcacgccgcggaaccaccaaccaagtttacgcgtgcgggcatcgccttggttcaatttttctagataggcttcaaacacaccagaaaaatgtagaaagacgagggtcaaggcgatcgggacgacgacacttaacgcggtgagcgtcagacttaataccgttacctgtcctgcaaacaacatgggcagaccaacgaaccaagcggggacagctggtaagaaaagccaattaaactgaccgctgatggacatgccgaaaagcgacatggaacgcggcagcaagttaggcagctgaccaccaacgtagataccaatcatcagtaagatctgcactaaattcagcatgttgcgcaatcgttcgccatcaaaaaagcgcaagactagcaagtaaacaaaaagcgccatgaccagacttaacacgccgctcagcagcaaaccgatgagaccgccaagtgccacgattgggccataatggataccggccatgacgagtccaggcccgcccattgctagcaacgtcatgcccagatagaagcaaatattgatcaaccgcgcaaaacttaacgtttgatcattgacgcctcgggaggcaaaaacactccggtcacgcgggtcaagaatcaggcttgagtaagtggtcaaaatagcgagaaaactcgtaagtagttgaatcgtcatgaaaagggtaaaggtcgtgagaattgaggtcgggagaaacataagcagccctaaaatcaggccaaagaagagattccataaaaaggcggttttgatgctcgcatcttgaccacgtttacgtttattgaacatactgcctaagccgctagattcacgagcggccaagagacctttagtcgcaaggattagccgcaattgatcaaactgaataccacgtttttccaataagggcctaaagcgcgcgagccatgcaaatgttttcggcaaaggcaacgcggctgtatcagttggatcagcggtgtctagggacgtctttttaaatagtttcatgggattcaccgccagtcacgatatccacgaaactttgtgccttttgaccgtgttcggcaaagccggttagatcgttgaagagctgttgcaggttggtgtcggcttccttggcaatggacttgaaggggccgtcagcaacgaccataccgtcattcagcacgatgatgcggtctgacaacttctgaacaacatcgagaatatggctggaataaaaaatggttttaccacgatcccgcaaatcctgtagcacttcttcaatgacaagcacggtgttggcatccaggccgtttaacggctcgtcccaaaaaagaatgtcgggattgtgtagcaggctggcgataatcaaaatcagttggcgcatcccctttgaatatgatgaaatgcgccgatcaaaagcctcccgcaaattcacaagatccgccagtgcaaaggccttttgttcagcatcggcagcgctgagtccgtaaagttggccaatcaagcttaaatattcacgagcagtcaaggcgtcaaacacgtcggcactttcaggcacatagccaatccgccgtttataacttgggtcgttgggtttgattggctgaccaaacagctcaatggtgccgccgtctggttgcatcaaaccgagcatcattttaactgtcgtgcttttccctgcaccattaggaccgatgtaaccaacaatgcttcctggagtaatcgtaaagttgagatcttttaaaacctccttggatccgaaacttttctggatgtggctgagtgttacgattggttctgccatgataggcctcctcttgtagggatgagtaggtacgcgtctaaaaaggtgccagcaagaaatgaaacgcgcttgtctgcatacttctttgggccgattatgacagaaaagattattgttgtatagagaaacaacttttgaataccgctttttggcgacaataaaaaacatcacgagagacaacgtgatgttaagaggctcgctaatttaatggactaggccaaacgagagccaaataaaaaacgaaaaatcggtcagtttgtgaaccgacgaaagagtggccgaagaataaaatataatactggtacgataatggccgttgcaattgaattgatcacggtggcaggcaaactcaggaaggcaccgaccacggctgccttgaaaacgctgccgaccataagcgcctcaacaaccccagtgagataagaagtgacgatttttgtcaggcctgcgagaataccaattatgatgatattgcgtggttgatcgttatgcttaaaggctttgaccaaagcgctgacaacgatggccatcacaatggcttcaagggcagtcaaccatgaggtagccgcatagccgttcagcagatcaaacccgcccaaaccgatgacagcggccacctaggaaaagaatggcaagcaccattaaaggattaccaaagtggatgaatggccgaccaaccattgccggaattggaatccgtaagagtgaaatgccaatgaagataatggcagcaaataaaccggtgaaaataatattctttaacgtattatgggatgtttgcatcgtaatcgcctccaaaatattgataataatgcatggtatgtggcagtttatggcagttgtttgcttagcgcagggatgacgccagccagattcaggccgtactttggatcggcatcagtggcaagcgtggccttgatcgcaagccgggcggcaaccatgccagttgcggccgcttgccgcaagttttgaccttttaacaaacccgtcgctaaggcagcagcaaaaagatcgccagtgccaaaataatgacccgtttcttttggctgagccaaggccagcgtggtaccggatgcatcgatgccgaccaccgcaatttgtttgtgaaaaggcacgccggtgatgagaacggcgctgtcaaattgggcatgcaggcgtttcgccaaagccgtgacggcagaaggatcggtgagcgttgtcggcttttcatccaaaagcagctgagcttcggtgatgttgggcgtcaagacagttgcccgatgcgccaactgttgcatggtcgccacataagcagcatcaaatcccttgtaaagtttgccgttatcggccatgacgggatcgatcaacacgagcggggcatgaaatttaggcagccaacgatcccattggtcggccgccttttgaccaagataaccaaggtaaatgccatcaggctgcagttgcagttgttgccagtgcttgagaatccctggcatttcggcgctaagatcaagataagtattggcgcctagtccgccagtgtgactagacagcagtgcggtaggcaaaacatacggcgtcaaccccagcccagccgctaacggcagcgccacgctcatcgagacttgacccacaccacaaagatcttgactgatgatcagactttttgtgttcacagcacgaatcctttctgaaaagatagttgttaataatgagaatgcgcaattttaggtgtcttgtcaacaagagcgtgagccagaccggttagaaaccggagtgtaagtgggcctgaacgtgatgaccggtttttggtcattgcgttcagggtccttacacgtaggtttctggtctggcgaacgcgtttcggagtcgcacaagtagaccgatctttggccacttaggattgaggtccttatacgtaggtttctggtctgaccaaggcgttatgagacccatcacgccctcctttaaacacgaacccaaaagcagcgcttccataaaaaaaacaaaatggccccggcatcgtgccgtgaccatttaatagaaagaatcaagctgaattaagcattccgaatcgtctgagtcgcagcagcaatgcgcttgacgacggttggattgtccatcgtgtagatatgaatcccatcaacgccatgcaccagcaaatcgacaatttgatcaatcgcgtaggcaataccagcatcacgcatcgcttctttattgccagaaaaatgctgcatcattgcgacaaattttggtggcaagttgacaccggccatggtggccatccgttcgatttggtgttcattgatcactggcataatgccggcttcgataggcacgttgatcccggctaattgtgctcgttcgcgaaatcgataaaaaacctgattgtcgaagaaaagttgactgatcagttggcttgcgccggagtcgactttttctttgagatggtgaatatcactgaccacatcaggagattcaggatgcttttctggatagcaggctgctactacgttgaagtcgccaacttggtgaatgtgttcgatcagatcacaggcatagggaaaatcgttactaacgcggccgcttttgggtatatcaccgcgtaaagcaagaatgttgtcaatgccagcatcttgaaaaccgcgcagttctgcatctacctgttctcgggtgagttgagcggctggcagatgggccacgggttccatatcaaactcatctttaatcagtttggcaacttcgagtgtccccatgtgaggcttgttgccattggcgccgaaggttacggaaacgaagtcaggatcggcttctttgaccgcatcgagggtgttgagaatcggagtcaaagcaatattgctcgcatttttgcgcgggggaaaaacttcaaatgagatgacttgatgatctttaaagcactggttgattttcatgagtgagttccttacgtacttgtttagccgctgccaccatgttgatgaggctggccttggtttctgggacatcacgagtcttgaggccacagtcaggattgatccaaacatgatcggcaggcagacgtttcagaatttcgtggatgatgtgcacaatttcgtcctttgaaggaatccgtggggaatggatgtcataaacaccaggaccaacatgagtctgaaaatgggttgccttaaggatgtccaagagactgaagtcggaacgggccgcttcaaacgagatgacatcggcatcgaggtcgtcaatcgccttgatgatatcaccgaactgcgaatagcacatatgggtgtgaatctgtgtttcaggcttgaccttgctgccgactaaccgaaaagctggtactgcccaatcgagatacttcgggtaccaatctttcttgcgcaacggcaagttttctcgcaaagccggttcgtcgatttggataatcttgatgccatgcttttcaagatcaagtacttcatcttccaaagccaatgcaatttgttcaacgctcatcttttggctcagatcttcacgcgggaaggaccagttgtagatggtaactggaccggtgagcatccccttaacgaggtggtcggtttgactttgggcaaagacagtttcagcaacggtgatcggcttggtgcgataaacatcaccccagataatgggtggtttcacaccgcgcgtaccataactttgcacccagccgttgtccgtgaagcggaagccgccaaagttttcaccaaaatattcaaccatgtcatttcgttcgaattcaccatgaacaagaacatcaaggccgatttcctcttggaatctgatccattcgatttcttctttgtgattgaaggcggtgtattgttcttcagtgatttcatgccggcgaagttttgcccgattgcgtcgtacttcagcggtttgcgggaacgagccgatcgttgttgttggcaatagcggcagcttgaacgccttagcttgaatcgccaaccgggttttccgttccggcgtccgcgtgtagtcggccggagttaaggcagcaatcttttcattcaatgccttattttctgcgtaccggggcttgctgaacaaagcgacgttggtttgataggctttgtgatcagcaccggtttcgaagatagcatccaattcgtgcagttcactgagcttttcttcagcaaatgcgaggtattgtttttcctcaggctttaaatgagtttcattgcgtaaggtgtatggcacatgcaacaaggaggttgaggtgcttaacaccagcttatctgtgatctttgccagcgttttaatggttgctaaggcatcggcataatgtgtgcgccagatgttcttgccattaatgataccggcaaaaagagttgcatctgcagggaagccttgcgttttcagaagatcaaggttggcatggccttcaacaaaatcaaggccaaaaccgtcaaatggcaacttactgatgcgatcaaatgagtcggtcaaatcgccaaaatacgtttggactaacactttggcgctttgcttttgagccagaagtggggtgtacagccgttcgaacaaggcgaggtcagcgtccgtctggtcatagaccaaggccggctcgtccacctgaatccactcagcaccagcagcatgcaagcgtccgataatgtcggtgtatgcagcaattaaatctgttacaaaatcatctggggtgacatcaatgaaccgtgataactttagtaacgtgtatggaccaaccaaggtcgggcgcgcattgatacctaatgcttttgcttcttcaaactggtcaaatagttgccagtctgtcactttaatttgtgtgtcctgatcgaattcaggaaccagataatgatagttggtgttgaaccattttttcattgccaaagctttgacatcaccagcatcgccttgataaccgcgcgcctgggcaaaataggtgtccagcggcgacagacccagcgcttgatatcgctttggcacgatattcaacaagttggcaacatccaaggtgttatcgaagaaggaaaaatcgccagtcggaatctggttaatgccagccgcttgaacagtttcccaattatgctgccgcagggctttcacttgttcctgtaattcctgtgctgtgatttgatgtttgaaatacttctgggtcgcaaatttaagctcgcgatgttcgccaatgcgtgggtagccgatgattgttgttgtcataaagaaatcctcctcagttagtgagcgcgagccagaccggttgctggtctgacaaacgcgttatagcggaaatttagttgcggaaaggtgcggtgcttgtttgggttcacgaaaggttgtttagcgagaaaatcgtgaatgtcaaaaaagccgccctcagcgcagacaaattgtctgcgccaaggacggcttaccgtggtaccaccttggtttgaaagccgttcacacgactttcctcaatcagtccgacagtaaatagctgtgagacctaacgcaataatgggcgtccccatgaccgcctcgcaatcgctcagcgttcctgcatcaccaagaccatattcgctgccgtttcttgatgtcctttcaccaaatggacactctctaagcaagaaactaacaactactcatctttccgcatttcaatgttgaggctagtttactgacgaagcttgttattgtcaagaactttgttcgaagagcgtgagaagtagcgattagttcggcgtagcgaagtgcgactgcgaacccttttttcgcggcaacagcagacaatttaaacgcttgaactaaaagaagagagctggcggagcggcgatgggctcagcactgaaatttgtcttggcggagtggttttctccgcctagacaaaggccgagcttcaagaccgcgggttttgcgggcttgaagtcgtgcccagtgcgttccagcccaatcgccgcgtagccagctcggcatagaaagctaaaggtaggctttatgttgccctatgctccggtttctaagcggggtggctcacgctcttaaactttttcactgacttgttttccaaattgcggtaagctattaaaacaagttatagaaggagaaagacatcatgagggtattgtttccgtacatcaaaaaatatcggtgggacgtgatctggtcggttttggcgatcttgattgtggcctttgcaacgttgtggcagccgcatttgttgcaggtaatcatgaatgccatcatgaaaaatgataagcagacagtctggattaatggtctgtatttgatcggactggcgatcatcgggattattggcgggatcgtcaacacgatttacgcggcgcgggttgcgctgggcgtggcaacggatttgcgtgcagacgaatatgctaagattcagagtttggcgtacgcggatgttgaaaagttttcgccatcgaacttggttgttcgaatgaccaacgatatcaatcaagttcagcaaatcatcatgggcttctttcaacaagtcacgcgaattccgattttattcgttggcgcggtcattctcgcgatcatgacactgcccgaattgtggtgggttattgcggtgatgatgattttagtttttggcgtcagctttttctcgttcagtcatatgggcaaatactttggccggatgcaacaattaattgagcgcgtcaacacgttagcccgagaaaatctgatgggcatgcgcgtggtgaagtcgtttgttcaaggcgcaaatcagatcaagacatttgctgagtccagtgatgaaatgcgggatgtcagcgtcaagatcgggaacttgttcgccctactaatgccggcgttcttccttgtggctaatttagccatggctggtagtatttggctgatcggacaggacattactagtcatcctagcaatctggcggcaattacaagctttattaactatttgatgcagattctgtttgccattatcaatggtggcttcatgttgacatttgcttcacgtgcgttggtttcactcaaacgtattcaagaagtcatggacacaaagccgagtatgacattcgtctctggcccgcaccgtgacttagatggcgcggttgaatttgatgacgtgacgttcacctatcctggtgatgaaaagccaaccatttctgacatcagtttcaaggtgaaatctggtgaaatgatcggtattgttggcgcaactggtagtggtaaaaccacattggcacagttgattcccagactgtttgatccagataccgggattgtcaaggttggcggtcacgatgtccgtgctgtcaccgaagccgatttgcggaaaacggttggcttcgtcttgcagcgatcaacgcttttttccggtacaattgcggaaaacttgcagcaggggaatcctaacgtcaatctagatgcgatgcgctgggcggcaagaatagctcagtcggctgaatttattgaacgcttgccacgcacttacaacgccgaagttgaggagcgatcctctaacttttccggtggtcaaaagcagcgtctgtcaattacctgtggcgtgatcggccagccgaaaattttgattttggatgatgcgacctcggctttagatgcccattcagagaaattggttcaagaggcactggcacacgagctgggtgatacgacgacgattatcattgccgaaaagatcagttctatcatcaaggcagatcgtatcttagtgcttgatgaaggccgtttagtcggcagtggcacacatcatgatttagttcaacataacgatgtttaccgagagatctatgctacccaaaaggcattggaagagggggtgtgattaaatgaaagacttgaaaaatgcaggtaaattttatgcgcattatctgaaaccttattggattgagtttttgatcacgacgattttggttggcatctctacctgggcaattgtggtcgcaccgacttacatgggacgagcgatcgaagaactggcaacctatgtgcagcagtggatgaacccagcaactagggcacaagcaacatttacgacatttaaccataccttggcgattttcgtcttgctttacatcattgatgccactagcatccttatctcaagcttattgttgtctaaaatcagtggttactcgactggtaccatgcgggtcggattattccgaaaaatgcaacggatgaaagtgaattatttcgacagtcacagtgacggcgatattttatcgcggtttacaagtgatctggataatattttcaacgccatgaatcaggcgttgattgaaatcttcttaagcggtgcccagtttatcgggattatctggatgatgttcacccaaaatgcgacgttggcctggatcacaatggcatcgacacccgttgcaattgggctgtcggccttcgtcatgcatcaagcgagtgtctcggttgatcgccaacaagatgatattggccgcctaaacggttatatcaacgagcagattacaggccaaaaaatgttgatcactaatggcttgcaacaggaaagtgtcgccggtttccagccgtataatgcggcggtgcgtaagtccaacctgcgcggccagatctggagcggtattttaaatccattgttgatgggcttgtcattgttgaacaccgcgattgtcatttttgctggttcttggttggcactgaatggttctttgagtcaaggcgcggcgctggccttggtagttgtgttcgtcaattatgcgcagcagtattatcagccaattgtccagttgaccagtctattcaacatgattcagctggccatcactggcgcccgacggattactgaagtgcgggagcaacctgatgaagtggatccgccagaagggaaaacgcttgacggactcaagcatgagttactgatcgacaatgttcattttagctatatccctggcaaagaaattttgcatggcgtgaccatcaaggtggataagggcgaaatggttgccttggttggcccaaccggtagcggtaaaacaacggttatgaatttgctgaatcgcttctatgatgttgactcgggggcgattacatttgacggcgtcgacgttcgcgaattcaagctcgcctcattacgacaaaatgtcggtattgtcttgcaagacccgcaactcttttccggcacaattcgcgataatattcgcttcggcgatcccgatgctgatcaggcgcgggtggaagcagcggccaaacaggctaacatccacgatttcatcgtgagcttgccagaaggctacgatacctttgtttcagatgaacaaagtgttttctcggcaggacaaaagcagttgatgtcgattgcgcgaactattttgaccaatccgcggttgttaattctcgatgaggcgacaagtaatgttgataccgttacggaagccaaaattcaagcggcaatggataacgtcattcaagggcgaacgagttttgtcattgcccatcggttaaagaccattttgaatgccgacaaaatcgttgtcttgcgtgatggcaacatcattgaggatgggagtcatgagcaattactcgcgcaaaatggcttctatgccgagctttaccacaatcaaatggtgtttgaataacttgtaaaaagattccgaataaaatcggagtcttttttatttttattcgtttgtgaaacggttgcaatggcttcctagcctcaataatatatgttatcctttttatataagaacaatgggtaggacggttctgataaatattgggatgatggaggtaacgaatgagtaagcgtagatatctggtcgctatcggcggcattttgcttcacctgatgattggttccgtgtatgcatggagtgttttcacgggaccgattgccaaacaaaccggttgggcgttgtcatcggtgacagttgcgtttagtatcgcgatcttcttcttggggatgagcgccgcctttatgggtcggctggttgagcgatttggtccgcgactgacagggacagttgcggcgttgctatatggctctggcattctgttgacaggactggcggtgcaacttgagtctttgccgttactttacattgggtatggtgttgttggtggtttgggattaggtgcgggttacgtgaccccggtttcaaccatcattgcttggtttccagacaagcgcgggctcgcaaccggcatggccattatgggcttcggttttgctgcgatgctgaccggtccgattgctcagaacttgattgctgggattggactggtgccaacgatgtatgtgctcggcaccgcatatttacttattatgctcacagcagcgcaggttatccggaagccgcgtccgggtgaggttcctgctgctgatattgctaaaagtgtcagtttgaccggtactgccatgacagccaaccaggcagtcaaaacgcgttcattccgctacctgtggctgatgtttttcatcaacattacctgtgggatcggactggttgctgttgcgtcaccgatggcgcaacagcaaaccggcatgtctgcggctacggcagcgatgatggtcggggtcgtaggtttgtttaacggttttggtcgactggcttgggcaacactctcggatctgattggccgtccgctgacgtacacactgatttttacggtggatgtcgctatgttggctggcattctggtattcagctcaccattgctcttcgggatcgccttatgcctgatcatgtcctgctacggtgcagggttctctgtcattccggcctaccttggcgatgtttttggtacgaaacagttaggcgctattcacggctatgtcttgacggcgtgggcagttgctggagttgttggaccgaccctgcttagccttagcgatcaatacttccacagctatacttacagtttgattttcttcgttgcgcttgaattggttgcttttattctctcgattcgcattcgccggcagttcagcgttgtggctcgtgatgaaaaggtgacggattcactcgaaaggcaacattgattggttaatactgtgacagcctcgaaaaaggctgctcgtgatcaacgaatgaatgggaaaattgacggttgtattggtctataacaatgaagtttataaatgaataagctctggaaaaatccatacagatgtatggattttttttgcacgctaaaatcccggtatatcaacattaatgattcataacgcgaagtatttaaaagcgtttaaacattattggttgacatacctgtacgtacaggtaaagtaaagcttgcaagtgaaagcgatttctggaggagaaggcatgcggaagtatgatgtgatctatcaggatttgaaagataagatcgaggccgaaatttatacgactggttcattattgccgagcgagaatacgctgcaggatatgtatcaggcatcgcgcgacacggtacgtaaagctttgcggctgctcaaagatgatggcttcattcaatcgcagaaaggcagaggatcaatcgtgatcaatcgccaagaatatgtcttcccggtgtcaggtgtcgtcagttatgccgaattggctaagcagcttcacttgcagacaagaaccgtggtgttggccaatcattttgccgcacttccggccaagtcctttaaagatgttgatccggatgttgaagtcaagcagatgcgtttgctgaagcgagtgcgttacttggaaaaagagccggatatcattgatatcgattatttggatccaagagtcgtgccgccgattccggagtcggtggcaagggattcgttgtatgcgtatctcgaaggacaaattggcttggaaattgcttatgccacaaaagagattacggttgaaacggcaactgaagaagatcgtcgttatctaaatcttcctgagggcgccatggttgtagttgttcgcagttgcagtagtttggcagacactagaaaatttcaatacacagagtcacggcaccgggcagatcgcttcaagttccacgacttcgcccggcgcgcacgaccatagagcgtgaacaggcgcgtttagaaaccggaatgtaagcggccttgaacgtgatggcctgggtttggctattgcgttcaaggtccttacatgcaggtttctgcgcctgcgaacgcgtttcaagcatagcgtgatctgatatgttgagactcaaaatttaagtggttttgaaagcctttgtgtttaggtctcaagctcagcaaacgcttttcaggaaagggagtcaccatgggatttcataataaagtcatttatcagctataccccaagtctttttatgacagcaatggcgatggggttggcgatctgcgcggcattatcgacaagatcgattacctcaagtcattacatgtcgacatgatttggtttaatccattttttgtttcaccgcagtatgacaatggttatgacgtcgcagattatcgtcaaattgatccacgctttgggaccatggccgattttgacgaattggctaaaaaacttaaagcggcaggtatcgacatcatgctggacatggtgctgaaccataccagcacagagcatgcttggtttcaaaaggctttagcaggtgacaaacattatcaggcatactattacattcgaccaccaaagccggatggcagtttgccaacaaattgggaaagcaagtttggcggcccagcttgggcaccgtttggcgatacaggcaattattatttgcatttatatgaacgacgccaagcagatttgaattggcacaatccagcggttcgacaagaagctgctgccattatcaatttttggcgagcaaaaggtgtccatggttttcggttcgatgttctcaatgttattggtaaagccgataagcttgttgatgcaccgccaagtgtagccagcaaaacgttgtataccgacacaccgattgttcaggactatttgaaggagctggcagcaaacagcttcggtcaagatgataatcgtgtgacggttggcgaaatgagttccaccacaattgccaattcgattgcttataccaaaccggacaaccatgaactttcaatggtttttcaattccatcatcttaaaacagactacaagaacggtgaaaagtggagcaaggtgccatatgatttcaacgccttgcgcgatattctccacacttggggtcagggacttgatcaaggtggtggttggcaggcactgttttggaacaaccacgatcaaccgcgggccatcaatcgatttggcgatgtcgggcaatatcgggttaaaagcgcggaattgctggcagcagcgattcatttgagccgcggcacaccttatatctatatgggcgaggagattgggatgactgatcctgattacaccagcatggcagattatgtggatgtggaagctaagaatgcttatgcagcactgctgggaaaaggcatgtctgaaaaagaagcattcggcattattttggcgaaagcccgagataatagccgaacgccaatgcaatgggatgcctcggaccatgcaggctttaccactggcacgccttggttgcgaccaacaaatcaagctgcaattaatgtgcaggctgagcttgcacatggtgaaatttttaaattttatcagcagctgatcgcattgcgtaaacagtatccagtgatcagtgacggtagctacacgccgtttggaactgaaattgatcggttgtatgcctatataagaacatatggcacacaacaattgctggtgctgaataatttcagcgacaagacaatgaccgtaccgctacccgaaaagtttcaaactgcaaaagtattaatcacgaacgaagctacattgacgccaaccgcaatcatgacattgccgccatacgcgacgattgggttattgcagaaagcgtgatttggctggtttgctagaagaaggcacttaagacaaagcgcagctgggttttcgtgccagcaaacgcgttgataaaagggggaacaagaaatggcagatacgaaaaagttgcagctcatggcaccggtctccggcttggccatggcaattaccgatgtttctgatccggttttttcacagaaaatgatgggtgacggttttggcatcgatccgactgatggtcagattgccgcaccagttgacggtcggattatgatgatcgcggacaccaaacatgcgattggcatcaaagctgataacggcgcagaattattggttcatttgggaatcgacacagtcgagctgaaaggcgcaccgttcgaaattgatacggctatggatgcccgtgtcaaagcaggtgatctcatcggatcgatggatttggatgcgattaagaaagctgggaaaaagacaaccgtcattgttgcgattaccaatagcaaagaagtcctcgatcatctcgacgtcaatgctggtgaagtgaaccgcggtgaagaagttgccgtgatgacgccaaagccaatggccgcaacagccgctgctgcgccgaagaacgaaagcaaatatgccgcaaccgctcggcagattattgccgatgttggtggttcgcagaatgtgaatagcctgattcattgcattacgcggttacgtttttatctgaaggatgaacagttaccggatgatgacaccgttagaaatattcctggtgtgattgatgttgcgcatggcaatggtcagtatcaggtcgtcattgggcaagcggtcactgacgtttatgatgaagcaattaaacaattgggtcccggttatgctaacgcggaaggaactgcgcaggcaatccaggagactcagcaagaagttcaagataccagtgcgatgggccgaatcaaacacgggctgcaggcactaattgggacaatcacaggctcgatgattccgattattgggcttttggctgccagcgggatgttaaaagggattttgctcggcttaacaaaatggggcggtttatcaacgactaatccgacctatgaaattattaacgcgatgggcgacgcaaccttctactttctaccgatacttgttggcttcaccgcggcacaaaaacttggctctgatccggtgattgttggtattatcggcgcgttcctgatctatccttctattgcgcaaatcgccacagcaggtaaagtcagcggcacattgctaggcatgagtattaatgccaacttcttcggtttgccagtgcacattgccaattacacgtattctatttttccaatgatctttgcggcgtggatggcggcgaagctcgaaccgtggatcaagagttggatgccattggtgcttagaatgatcttcagtccgttggttgaaatcttcttggttgggatgacggttgttctggttgtcggaccattactcactgtggcatcaggcgctttgacatcagggattcaagcattgctgaacttgacgccaatgatctcaggtgccatcattgctggtctctatcaggtactggttatcttcgggctgcactgggcggtcattccgattatcgccgcacaattatcatcggcacatcctgaatcaattctgaacgggattgtctcgatctccatgatcgcacaaggtgccggtgcgttggcagtttgggtgaagacaaaacacaatccagccctgaaaggtttgtcgctttcagcctttatcagtgcctgttgcgggattaccgaaccagccatgtacggggttaacctgaagtatggccgggtcttcatctttgcaagtatcggcgctgcaatcggcggtctggtcaatgggctgcttggggttaacatgttcggcttcaccggtagcttcatcgggttcttctcgtttgatgcgccggcttgggcaaacagtcccaataacttaatgaatttctggattgcttccattgtgacgcttgtggctgccttcctactggtttacttctttggttataaagatgctgacgccaatcaagcaaaaacggcgccaaagaaaaagcgtttaagcaaaacagttgaataatggcgtgttcaccaacacgtacggtttccatgtgtgcgtgagcggcaacaattgattaaaaaagcacgatgtcagcggacatcgtgcttttttcgatttcaaggcatgccgaagagcaaggtgctcgtatgacgatacatggtactaacgcttagttaaaaatgagcaaatcatggcaatggtggataagcacttttaattaagtgtgttattcaattttcctgttcttgctttaaaaaagtgatcctatttgaattaaattgcttgcagttgttgtaaaaataaggcaaactaagaagtgctctcatggaaagttaattttagatgaaggaggggccaagatgtataaacggtacaaagatgtttcgttgatcttaaaaattgtcattgggatcattgttggggcagtgttaggggtaatggtgccctcctggtcctttattgatgttctcggtaaattattcgttggcgctttaaaagcgattgcgccactactggtctttctattaattatgtcggcgatctctaagtatcgctcaggtgcgaagaaccactttggcaccgtcattgtgctttatctcagtgccacgttgttttcatcaattgctgccgtggcggtttcgtatctttttccgatcaaattggtgttgcccggtgcgatgaagatcgccgaaagtgcaccgaaagatctggggactgttgtgacgagcttactaaccaatgccgttgccaatccaatctctgcattggttgaaggtaattacctagctattcttttctggtccttactgatcggttccggtttacgattgaccagtgctgtgaccaaaaaggtggtcacggaattggccgatactgtcagagctgtcgctcaaaatgtcattcagttcgcaccgtttgggattgtcgggttgttacacgagtccttgagtaaaactggtgtcaaaggggtcatggcatatggtcagctgctcatgctgctggttgccacgatggtatttgtttacttagtcgtgtacccattcatggtttggttgatgacccggcaaaatccgtatccgttgactttttggacgctgaaagtcagtggcattccggcattctttacaagaagcggcgctgtcaatattcccatcaacttgaaggcatcaaaagatctcggattaaatgaagaaagttatgcgatctcaattccgcttggtggctcggcaaattctggtggcgcagcgattacagtgtcgatcatgacgttggcaaccgccaataccatgggtgtacatgtcagcattttcctagccttgttgctatgtttcttgtctgccatctcggctaccggggtttccgggatcgcaggtggctcactgttgttaattccaatggcggcttcattgtttggcatttcaaatgatattgccatgcaggttgtcggtatcggttttatcatcggcgtggttcaagattcagttgaaacggctgttaactccgcgtctgacttgctgttcaccgcgactgccgagtatgccgacgatcgccgtgaaggacatccggttgatattcgagctaaggtcaaagcggcaggcaagggaacggcagaagttgtcacacctgaaaaggctaatgaagctgaagaaagtgaacaagtttagttcagtcaaaagaatcgcgaattttcgcgattctttttatgtccagctaatttgagacaaaatgataacgagtgtttttgaattcacatcagacaataacgaatgtctttaaactcacagcgctttccagccaagctgaaatgtgctaacctatttctcatacgttttttaaatatgtgagagactgactgcttgatgagcagtgccatggaggttaccgatggggcaagtttggcaacgattgattagaaaagaagatccaagtgtttatgaagataaggattcacatttaccgcgcgttttacgcgtccgcgattttcttgcgttaggggtcgggacgattgtgtcggcttcgatttttacattaccaggggtggtggcggcaaaacatgctggtcccgctgtgtcgatttctttcttagtagccgcgatagtcgcagggctggttgcgtttgcctacgcggaaatgtcagcggcgatgccatttgccggttcggcttattcttggatcaatgttgttttcggcgaattttttggctggattgccggctgggctttattggcggaatactttatcgcagtggcgtttgtggcgtcaggactttcagctaatttccgcgggctgctggcaaccattggcgtgaattttcctaaagccttggcgaatccggttgggaccgatggtggcatggtcgatctcgttgcagtggtcgtcatggtgctggtcggcttgttactgtcgcggggggtatcaagtgctgcgcgcgttgaaaacatcttggttgtcatgaaggtgctggcaatcctgcttttcttggtggtcggcttgactgcgattcaccctgaaaacttccatccattctttcctgcttatcatctcaatgctgacggtacaccatttggtggttggcaggggatctatgccggagtttcaatgattttccttgcttatattggctttgattccatcgctgctaattctgcggaagccattgacccagagaaaacgatgccgcgcggtattctgggttcgttactgattgcagtgttcttgttcgtttcggttggtcttgtgttgttaggtatgttcccatatcaggattatgccaataacgcggagcccgttggctgggcattgcgtcattctggccatgcagtcattgccgttgtggttgaaagcattgcggtcttaggaatgttcacggctttgatcgggatgtccatggctgggtcgcgcttgctttacagttttggccgtgatggcatgctgccgcaaaaactgggtaagctgaacagtcgtaagctgcctaatcatgccttggctgttttgattaccatcggcgttttgatcggcgctttcttcccgtttgcctttttggcccaactgatttcggctggcaccttgatagcctttatgttcgtgacactgggaatctatcgattgcgtccgcgtgaaggccaagatatcgccaaaccgcgcttccggatgccactgtatccagttttgccagcagttgcctttctgggatcacttatcgttttccttgggctcgacattcaagccaaactgtattccggtgtctggttcctgatcggctgtgccatttacttcctgtacggcatgcgtcactcggctctgacaaagggatcagcggttgagcaagaaactgcagcgttaggacaagaaaaagattaaaaaagccgctgcctgagattgcccgcgttgtgacgcgcggtctcggacagcggttttttggtacggtggcttagtgatactcgtctggagagacaccgttaagctgagcgcttaacctgacgagcctaagcttcttgagccttcttcagattttctttcaaaatagctgcagaatcggctaaacgcttatgatcttctgggttcaaatccagctcaatgatgcgttccaagccattagcgccgaggattaccggtacaccgatggaaacacctgacaagccgtattcgccttccaaatggacggacattgcgaatgctgcgcgatcatcattcaagaaggcgctggttaaacgggttaatgaggcagcaatgccgtagaaagtggcaccttttttctcaatgatgccataagcagccgttttgacgcgctcgctaatatcaggcagatctttatcctggcgatctttaggaatccaatcaagaatcggtttgccgccaatgttggtgtagtcccaaactggaaattcagaatcgccgtgttcacccatgatgtagccgtgcacaatccgggcgtccacgttataacgcaggccgatctcagaccgtaagcgagctgaatcaagcgccgtccctgatcccagcacctgattacgtggcaagccggattcttgcaagactaattcggcaaggacatcgactggattggatgcgactagaataaacccattgaacccgcttgccataatgttatgtgtgatttctttcatgatctttgcgttgatggccaaaagttgtaggcgtgtctgacctggcttttgggcaattccggctgtgatgacgataatatcggcatatttgcaatcttcatagctggccgcataaatattcttctgtgacgtataaggtagggcatcagaaagatcttcgacgtcaccttgcacgcgtttttcgttaacatcaataataccaagactctggccgacgccggtggtgagacagttgaacgcataacttgatccaatcgcgccatcaccaattaaaataatattgccgttgttccgcatctcaaattcctcctcatgaagatcttgacgacaggtacccaaaactgcgacaaacgactatgagtgagcagtcatgaagccgattacgacgcgccataaaatcgattgccgccaaagttgttgcatgtatccgatttcattgtaacagaggtctgcatgcagggcttgataaacgactgggaatatttttaatatcaagataactttcttatcaaactgccatctttctgttagtcttgaaacaacgcttgttacattttcttccagaaaggtggttcctcatgtcagcatcatcttacgtacagtccattctcacaaccctcaaacaacgcgatccgaaccaaccagaattttttgaagcagcatcagctttgttaaaaaccatcacaccggttctcgaaaaacatcctgaatatatgaaagctaatattctcggacgtatcgttgaaccagaacgagcgattcaatttgctataccgtggcaggacgataagggccaaatccagatcaatcgcggcttccgcgtccaatttaattcggcaatcggaccatacaaaggcggtttgcgcctgcatccttccgtgaatttgagcatcgtcaagttcttgggctttgaacaaatctttaaaaacagtctgacgacattgccgatcggtggggcgaaaggcggcgccgattttgatccgaaaggtaagtcaaatgctgaagtgatgcgtttttgccaaagctttatgacggaactcagtaagtatatcggaccggatttagatgtgccggcgggcgatattggcgtgggtgcgcgcgagatcggttatctttatggtcagtacaagcggcttaaaggcgcacaacgcggcgttctgactggcaaggggttgagttatggcggatcgctggcgcggacagaggcaaacggctatggcttgatttactatacagacgagttattgaaggccaacggtgaatctttggctggcaagcgggcggtgatttcaggtgccgggaatgtcgccatttacgccacgcagaaagctgaggagcttggggtcaaggtgatcacggtttctgattcaaacggctatatcgtagacgaaaatggtattgatgtcgcggtcgttaagcagattaaggaagtggaacgtgggcgcataaaagcatacgcagatcgggttgctgactcccattattatgaaggctcggtttgggacgcggatcttcagtatgatttagctctgccttgcgctacccaaaatgagattgatggcactcaggctgcgcgttttaaggctgctggcgtcatcgcggtggcagaaggtgcaaatatgccgagtgacccagaggccatcactgcctacactgatgctggtattttgtacggcccggcaaaagcggccaatgctggcggggtagccgtttccgcactcgagatgagtcaaaattcgcggcgcctcagtgacagttttgaaaaagttgatggccaactgcatgacatcatgcagcatatttttaaagctagcgcggatgctgccgctgaatatggtatggccggtgattatgaggccggcgccaatattgccggctttctgaaagtggctgacgcgatgtattatcaaggcatgtaggtatatttagacattaattagaaaaaacacgaaataattaggtgtttttttccgaacgtgttatactctgtacatggtaatacttgaacgggaaacatcatgttacgtgaatttcctttttaggattacggttgtctgttgttgttagttttgaaaaggagattcattttcatgcaaaaaggtacagttaaatggttcaacgctgataagggttacggcttcatcactggtgaagacggccaagacgtctttgtacatttcagcgccatcaatggcgaaggctacaagagtcttgacgaaggtcaggctgtttcctacgatgtagaacaatctgatcgtggtcctcaggctgctaacgttaccaagctttaattcttggttcgttaaaggagatccaatcgggaaaccgattgggtctttttttatgagcgcaaacaggagcgcctatattcaggcttttgcgactgcgacagcattattgcggcgctggtccttgtagtagtccaagccacctaatttcattctaggcaggctctcacgcttgctgcttcaaggttaattgccacacactaacaagcacccaacaagcaaacggcatcgcagcgacaaacaagcctatgaagattaatcctggtgcatcgccgctttcagcccatagatagctgaagtttaagctgatgatcgcaatgatgatagttatgccgcctaggagccattgcaagcgacgaacgccgctggtgaccttctgcggtgaacggatgatttgccacaaggtgatggcgctggcggcgatcccgccaagtacaagccagccgccaagcaggacgagaattaatgaaacagttggttggacggttaacagcagtaaaatcgttgcccataaaccgatagcaaggaaaaccacactgccaagtagcagactaagtgccaaaacaagatgatgttggcggacccacaaagatgcttttgacattttaacaacctccaattagtccatacgctagcgcattgttgcgttcaatagtcgagtgaccgcgcttcttgacgaaaaaacaaagaaggtatcagcctaaacgccggtaccttctttattatctttgagaaaaagtcgtggcgctgatgacttactcgcctagcgttggctcgtctgtgaaatcatcaacgatgcggaagctgacattttcattttctttcaaaagtttggcaactgggcattcgtccagtgcctgggtgacaatcttttgtgcttcttcgcgggtgtggctcggcatcaagatttgtgcgtctacgatgaatttgtagccaatcttgtcacgggtgatgtccacacgagtacggagctgggaatcttcagcagtgccttcgcgatgctgcacgatgcggatggtcgcattaaaacaggtagacaaggcaaaagcaatgaactgctccgggttggtcccaggggcgtcaatcaaggagctagaaacacctaacgccaagccttgattaccttcgacataactttcaccgactaaaccattttcgttgcggacataggtatgatacaaagaacgttctgccatgctattcatcctttcttatagctatcaccgtgagtataacatggaaccgctttacatgggggcattgtgtctcggttgcaacgcctgaatcgctacgtaccaaggcgttttggaatggataacaaacattttcaatgggttttgttttgccacaaaaactaaacagttatcgctagtgtcgccataaaagctcagtcagtcatggttgcaggcgaatgatttttgtcgcaacctgctcgataaaatgctcatcgtgttcgacaaaaagcatcgttggttgataatgtttgatggcggcaaccagttggtcttggttgtaagtgtccaaataattgagcggttcgtcccaaatgtacaaagcggccggggtggctagcgatcgcgctagttcgacttttttctgttggcccatgctcagatgctcaatcggcgtgttaaagtcggctcgcggcatgccaagtttgcgcaagttgttaagcaaggtttcacggctaagctgatgctgtttggcaaagtcgactaatgtactgcggttatcggtgtattgttggcgaacaaggctaagactgacgggtgccaaggtgagatgccctgactgcatgccggtgaactgcttcagcaaggcgcggatcaaggtcgacttgccgctgccattgtcaccaacaatggcaatccgatcgccgcgggtcaaagtaaaagagatcggctggaaaagcggttgatcgaatccgacttggaccttttcagcgaccacaagttgatggtgatgggtcgacaccggcagcatggtgagtggatcaaccttttctaggttctttagaagactttccttctcatcgatttctttggtcatccggtgttcgagatttttactttttttcatcgtccgtgcagctcgagcgctaataaacccgcgaccagcattatgaccgctgtccttgatgtgcggattaccatagatactcttttctttattttccgcccaaacttttttatcatgagccgttcgtttaagtcgggtaatttcagttttaagttgaccatttttggccagttcagtttgatcttgccgctctttttcggtcatgaaggtggagaaattgccttgataaagggtgatttgctgccgctggattgctagcgtgtggtcggtgatgctgtccaaaaaatcacgatcatggctgacgacaataaagccgggtttttgttggagataggcggcgacttgtcggcggctgcgcaggtcgaggtgattggttggctcgtcaatgagtgcgacaccattgtcttgaatgaacagtaaggcgagacgcacttttgtttgctcaccaccagataaatcgacaaatgggcgccagagaatgttaggatcagcgtggagcagatttagttcacgttcgagttgccattgcgcaacatcggtgatggcttgtgcggcagtcagcgtcagttgggtttcatccagcgtttgaggaaaatattgcaactgcaagggaacagtcaccgtgccactgtagggtagtgcttgttgtaaaattcgcaacaaagtggttttgcctcggccgttgcgaccgaccaatccgagatgccagttggtatcaaggtcaagggttgtgttcgtaaaaagcggtgcttgaccgtcataagcaaaattgagctgtttaatttgaatcgtagacatacagccacgtcctttcggggatgtgcctgcgtgatcagaacgtgaatcggtatgactttttatggctgaaaagtgttgaaagtttgcggcatcagccttgctattgggttatttggcagcataactgcgctggcttgtatgcaacaaaaaagccagtccaataacactttgggactgaccaaaataaacgggggtgccgtccttgatcaagcccaattgtcaaaaagtccgtactaatcccgttgatgatgacaggacttggacattttcaacaattggcttacttcaatggacgaaacctcactttcgaatttaacttaggtttaaattaccacgtgaagctactgtcgtcaaacatgtaatgctttcacaatcgcttcattaccgcttgcaatcttcactgtgtctcgatggcgattgctgtctaaggctgctactaggacgtcagcaacatctgcgcgtggaatggttgatggtcgttgcggttgcaaggtgatactgccttgtgcaggatcgttggtgagcgcggttggctggacgatgacgtaatccagatccgtgttgtgaatgagccattcgtcagcgtagtacttggcgatgtaataatcgtgcaactggtctggccatttgtccggatcttcagcatcaagggcgctgagcatgatgaatcgactaatatcagcgcgttcagcagctttcatcgttttgacagcaccatctagatcaacgccaagaagatcttgaccgcgtgaccctgctgcgaagacaattgcgtcatgaccagcataaaggtcagctaagcgatcaaccggccatgaaagatcgagttccacggcgcgaaagtttttctcgggatcaggtgtctgagcgattggatcacgataaccgcctgtaactgtatcaccacgatcaagcagtttgtggaccagcaactggccgatttggccgtgggcaccgacaacaaagattttcaaaacaaatatcctttcatggaaaatgattgctattagtataacgttttttatgacagcaagaaagcagttgcaggcaggaatgctaaaaagtttagtgcggtgagtttctagaataacccggttacagtcgcagaaacccatgcatcagggatttaaagcagttctgtctgcggccataaaaaaacgcggctgcttgcatcaaccgcgctgttgccatcgttaaatcatttcaagtggaatatgatgccgcggggccgggaaagcttgatcgaacaacgccaattcgtctggtgaaaaagtaacatctgccgcggcgatattttccgccatgtggcttgcttcacctgaacgagggatcgtgagcacgtcgccatgacgcagcacccatgcgagcatcagttgatgggttgaaatgtttttctctttggccaaagttcttagttccggtggcagtttaattgacttgccactgcctgacccaaatggcgagtaaccaattgtggtaatgttggcctgcttttgctgtggcagcagatcatattcaataccgcgcgattgtaagttataaagcacttcattagcctcaatttggtcgccgcccggttcgagcgttaattgatccatgtcatcaacgtcaaagttcgacacaccatattgcttaattaaaccttccccagtttacaattcaagtgcaacaccctgacgactagaccaaaaaggccatgaagacctattcttgttagtgctagctaaacaagaaagcaggaatcttcatgacccactctcagactaacacccacaagcattaccaacaactcagttttagcgaccgtgctacaattcaggcccttcgggctgctggtgacaccgcgaccgtgattgcacagaagcttcatcgcagtaaagcgacaatctcacgagaaatcacgcgtggatctgtaactcagctcgactcgaagcgtcactcgcatcaagtctatcttgcggaaactgcccaagccatgcacgaccgtaaacgcgatagaaccggtcactacgcctttcttaagaccggccgtgcgttcttcaaggctctcgccagggagcttactcgtaagccgcgcgtacacagcgttgatagcttcgtacacttctatcgcgaccagggcaaggcttgcccttcaacgacaactgtgtatcgctacatcgacgccgggctgcttgagctagacaacatgacacttcccaagaagctccgacgccgcatcaaaggctataagaacgcccacaagcgcaagaataagaagatatacggcgactcaatcgagttgcgtcctgcggccgtgaatgaccgcacaggcgtgggacattgggaaggcgacttggtcaaaggtattcgcttagctgatgagccagcattaatgacgctcacagaacggtacagccggactgagatcatcgtcaagattcctgactatcatgcgggcacctgccttaaagccttgcaggacacgatcgacgactacggggccaaggaatttgagagtatcacttttgacaatggttccgagtttgccaagttatcagagattgttggaacccagatttacttcgcacatccgtactcgccttgggagcgtggcacaaacgagaacgccaatggactgcttagggaattcttcccgaaagggaagtctctcagagcagttaccctggttgaaattcaagcagtccaatccgcactgaaccatcgtccaagacgtattctgaactatcttcgcccatgcgattactaccgatgcatggcgtaacagactagaccactatcaaggattcgttatcatcgttgcacttgactttaaaattggggcttaattaaaccttctttttgcaaatcctgcaggccttcgagagtttctgctaacggggttgacccgcgccagtgaagcagatataggtcgagataatcagttcgcaatcgtttaagactattttttagggctgttcgcatctgtcgcttgtctgcgtgtgacggatagaactttgagatcagatagatgttggcgcgatcataatcaccaagaaaactgccaatcagtgactcagctgccccgttgccatacatctccgcggtatcaatcacggtcaaaccatgattcagtccatactttaaggcagcagcttcctgttcactttgtgccgcattgccttcgcctaagtaccaagtacccatacccatgatcgggacattgacgccaccaatcttgattgttttcatgatccgactcctttctttcaacacatctattatacaagttgtgaaaaaaatgaccgctttaaatagcgcttgtgaaagaagataaaaaaagcgtgttacctacgcatgaacgtgcatttttttgcaggtcacgagacagttttcacgcttctccatatcaattagttgctgaaatttgctattgccgattagctttaacaggttgcgtcgcaggctttcgacgttgatacaacaagtaatgcagcacgaccaaaccaagaaagacgacacctactaataatgaaacacttgtttctgggtttagtagcatgaaaaataaagtgaacgcgaggaaaataagtgtgagataattgttataaggcgcgaatggcattttgaaaggatggttggccatctgatcagcgtggactttgcgaaagcgaatttcgctgactaagatgacgatccacggcaccataccaggcaagacgctggaactataaactagcacgaaaacatttttcgcggctggggcaatgtaaggcagtaaggcattcaaaatgacgcccagtaaaatcccgccgcccacggcgatgaccggataaaaaggtaccccatgacgatttagtttggtgaaaattcgtggcagttgtttggcatcagctaaggtgtataacattcggctggctgagtaaatgccagaattggagccagataaggcagcggtaatcaccacaaaattaatgagtgaagcggcaaatgtgatgccaattttggcaaatgtctgaacaaacggtgaccctaacgtgctgagctgattccaagggtaaatggcgacgatcacgaaaatcgcaccaacgtagaaaatcagaattcgaccaatcgtgtctttcactgctttaacgatggtcggtcgcggattctcagcttcacctgctgtgataccaagcagctcaacaccttggtaggagccgaggacgattgacaaggcaaaacagaagcctttaaacccgccggtgaaaaaaccgccgtgggtccagagattgctgataccaaccggatggccgccattaccaatcccaaataaaatgacgccaaggccggcaatgatcatcaaaacgatcgtcacgactttaatcaaggcaaaccagaattccaattcgccaaacattcgcaccgaaattagatttgctagtacaaggaaggtgatggccactaaccccggcagccaccccggcaacccgggccaccagaatttgaaatattcgccaattgcgatcatttcggacataccaacaacaacaaattggaaaatgttgctccaagcagtgagatagccaaaaatcggatgcatgtattcactggcaaacttggcaaatgaaccagttgccggatcaatataaagcatctcgcccaatgcacgcatgatcatgtaaaggaataggccggcaatgatgtaggcgatcagaacagatggccctgtccatttaatcgtggcgcctgctcccatgaaaaggccaacgccgatggtaccgccaagcgcaatcatttgcatgtgacggctgctgagttttcgttgcatggttattttcgcttctttcgtcttgagaaatacaagtaatgactatacaagaaaagtctaaccggcgcaaacaggtggctatgaaacgtagacatgaaataggcatcaccgttaacacgcttcttgacattcaagtcactatgtccgttatcggcttttgcggtaaactagtgacggatcattcaataaagtaggatatgaggaaatattttggataacaaaaacaaattcactgcatcattaaatgcctatatggcaaaacacaagttgaacaccaatgcgacatccgcagcgatgggtgtttccgtgccgactttgcgtaaagcactgcgcggccaaagcgtgagccgcaagaccgcggctaagattgaaagcatcattaagtctggcaaggtgccagcagaagctcacaaaaccgctacgaaggcgccagctaagaagacggcgcctaagaaaccagctgtaagtaaacaggttaaaccagccgcgacagcgaagcagccagctgcaaaagccaaacaaactaaatcggctgaacaagtgtcagcaagtaaatcagcgacaacaccaaaagcctcgcgtgttcaaactaagcgggcagccaatcagcagtcgcaagcaactagccaaacgccgactgcaccacaaactgaagcagcagcaagttcaaaaccggcacggcgcactgctaaacgggtgacgcgttcaactgtcacgtcacggcaaaaccagcgccccaacaatcagcaagagcacaacaacaatgagcaagcaccgaaacagacgcctgttcagaaaaaaattccgacgcggcagcatcgcttcacgattcgccagcagccggatgttgcgacacaggaagcagaagctgaggctaagaaacgtcagactgaagctaatcggtcatctgtatcggctagctcatcttcaagtcagcaatcgactgagcagcgtcacgacaatcagacagagcgtcacatcaagaagcggacagtaacggccccacggcgcaatgtgaataaaaccgatcacgaacctgcccggcgtgataatggctatacgcgcaacaatcgcaataagccaaatggtaatcgccagcctaaccgcacgcgccaaaatcgattcgcagccaacgctgatcctcaaaactggcagccaatgactcagccggcggcatcaagtgcctcacagtcaatgacagccaaagcgtcgaccgacaatcgccatgtgccagcagtggttaatcacgttgaaacgcatacaccaagtgtgattcggtcaacctcaaatgaccgtaacggcaaatacaattcagctaatactgcaagcagcagtaccagcgatacgaccagtcaacaggcaacgaccggtaccaacatgcatactaattatggtactcatgatgaagcaccgttggtagctggcaaacagttgcaactctttattgatgaaagttttgaagagcaccgtccagatccgcgtaccatgcacatggggatcgcggctattttcccagaaggcgacgacgacagtctcattggcttccgtaatgcgctctatccctatggctgggaaccaggggatgaagttaaagctcgcggtaaacaggttgatgccttaacacagctgatcaaagcagccgaccatgaaaacatggggatgtataccgtcttttcacagaaaacgacgtatcctgatttcgccccgtcaatggaatatctgtatccatacatcggcgccacgattcacgtgttgcgtgatgttgacactacttttgatagtattgtgatcatgatcgatcatcggaatgaattggaaggtaatcagctggtgatgggtgctgatattgtgagtcgctacttgacgctttccttggaacgaccaatcaaggttcggtttgagtttgcagattctcgcgagcatctcggcttgcaactgtcagactttgttgccaatgctgctctgcggcttagtaatgacgaactgagcctcattgggatcacgccaatgcctgagttgggcgtttcgcaacacgatcaattagtccgattgacgttacttggcttgcaacaggttgtgatgggtgtgcgcgccgaacgagctgcaacaccatcaaaacattcacaacctgatcgcttcatgcaactgatctttgatgccacttacgccgattccgatcaggtacgcggtgcgttgccggttgtcaaaaatgcagtcgagcaactcattgatgttttgccaaatgctcgggtcggtcaaatctccggtatgccaaaccaaagctggtatgacatgacagcgcggatggcaggactattacggtatatcaacaaggatccaaaaccatatggccgggtgcttgcaaagatcgaaagcgtgacgaagactgccgctgacgaactggaaatggcacttgattctgacgataaagccaagcattaattgggttttaaatgacaaaaagggtactgcaatttaaccattgcagtacccttttttagattatcaagtgttgttacttagtgtgttctttttaagcaatgaaactattctgattttgtaggtacgtaatttcgtcaaaagtaatgcgtgtctgcaatcgttgcatgatctcccggttgagtttgccttcagcaaaagcaccttgaatgaactcaaattcagcatggaatgcctttaggaacatggcatatagcacatcaccatcgaacgaatccgtatgaacccggcgatgccgatcacgatagaagcggcgaacgatgttgatggcactgcgattttgactattttcggcacttgccaagtacttcatcaccgcatcatagccggcctgctcgataggtaatagatcttcaccgtgctcagtaaattgccgtttccaaaaaatcggctcaaggttaagcggtgtggttaaaaaagcattttgcgcttcgtctagacctttatacatacgtcccatattaaaggtgaaccgtaagcggagaaaaagatttttccacgttcgctgatctgctgtgaaatcatttaaatcaataaagcgattgtaatagtgcgcttcgtcatgcgtgatggtcccattgacccgtaaagcttcaatggttcttttctcaacttttatggtggtatcaaagatatcccattgcattcttcgcgaaggtttatcgttcagaatcatttcctgcgacaacgcgtctgcaacgatttgggcttcgctatgatgaacggattcatcccgcatggcatcaatgccagctgataacattcggcgcaccaaacatattggcgattgcgttttggctgcttaggcacgcagaatggtagaaccagtaccggcacaatcagactgagtaaaatgacagttgccgcgatcagaatcaagccttgccggagcggaaaactgtggccattaacaatttgtggcattgaaaacgccaaagataaggtgatagtcccattcgcaccacccagcatcataatgacggcgttgcgccagcggtgttttttaccagtccgcagcaaggttcgactccatagtaggcgaaccagtgacttggctgcgtaaatgaaaatgccaatacccacaagcaaactgaacaagccagcttgtccgcgcaaggcgctaacgatgacattgggcagcgagaggccgagcaaaacgaagacgagtccggaaagaatggccgctaccatttcccagacattggcgctgacgatttgcatacgggcactggtcagtcgcaaacgatcgcgctctacaccttgcgcaatccccgaagcaacaaccgccagaatcccggacaggccaagttcttcggctagaaaataaaccaacaatggcgtcagtaactgaataccgaccatgatcaacggctcatcgtcgccgatatgaatcagccaggcccgcaaattcacgatcagcatacctaagactgccccgaccaggataccgccgaagaagacgaagagaaaatcgagcaaggcgtctgttggtgaaaattgtccggaaacataggcagtcagtgccagatcgaatgcgacaatgccggctgcatcgttgaacagactttcattggacaatagttgcatttggctgtcgctcaaaggattggtctgggcaacggcgctgaccgctgatgcatctgttggcgtgacgatagcaatgagcgcgaaggcaagacttagtggaatgattggaaacagcgcatgaacgccaaagcctaaaataatgactgaaaccagcacgaggccgactgccaacgacacgatattggttaaagagcggccaatttgaatacgggaagcattttggccttcgttaaacaacagcggggcaatgatcgcaaaggagaagaccgatggatcaagtgtgaaattacgaagagaaggcataacggctaatgccgccccaaggccgatcaagaagaatggcaacgggatcttaggaacgtgccgtgccaagatgttgcctaaaatgacgattgccaacatgatgccaaagataacaacctggttcaaaaatgatcacttccttgattgaccttatttgacctttctattttagcaccaatgcaaaaaaataaccgctcattggtctgagagcgcgagcagtttctgcgactgtgagcgcgttttctacaacggcgggtatgctgacaataaggatggcttgtaagtattctttttcattgggttgagcatctttattgctatgctaatgatgttggttccgatagcctgagctggctacgcggtgattcgggggtggcgaccgcggaactaccgagaacaacctaaccagaatagaataaccgacactttaaacagattatgcgttagtgacacaacgacaacttacttcttcaaccgcttttttaaaatgtgcgtcatttttctagctgtcacgcgccaagagaggtatagggcgatccaaatgaaggcgtagatgacgatgaacgaaatgatgaagctggttaaggcagagccaatcaagaattgccagcccatcaggtagttcgttgcaaggacgatcaaaaaggtgctgatgaaatgggtgccatatgcaactggtaaactgagccagtcaagatcgaaaatcgaagataggatgccaatgacggcactcatgatgaacagtcccgcgatagaacgcggtgttggattaatcgtgtctaaatgcaacattaaagtggtcagataaacggttgcgccgatcatgatgccaatgacggcctcggtcaataactgctttgcgattctcataagggccacctcacaatcctaataaacgtttcaagtcaggaagaaacttacgactgaccgtcaatttttgctgattactcatgaaggcggtcatattaccggaaaaagaagcttccagtgatgtcaaataattgatattcagaatggtacttttggctacctgaataaaaagctgaggatcaagcttagcgcgaatggcttttagctggccacgcgaagtatagaccttggtcatcgtgtggaccgtgagctcgtcaccgtagacttcgattgccacgatgtcattaacggccagtaccacgacgcggtcaccaacagttagcggaagggttggtcgattgtcggataattgttgaatttgttgcaagagctgcaacacagccggtgaaagccgcgcagccttgatgagcacctcaatatcatccggattcaagtcaggatcttgatcaaatgaaactttcataggctcagtctccttccgcatgacgccagcgtatcgcacgattacgtttcattatacgcgggcgagggcggcctttcgactgaatctggcaagaaggaaaataaggatgctcacaccaagcgtaaaaccaatcaaaatcatgtaagtgtggctgctagaaagcaagccgttgacgtcaatgcgaacacccaacattttttcaaaactggcccttgcagcctcttgcttgccagtgaaggtcgtggctaacggctgttgcaacagaatctggcgataagcagcggcgttgtatgggaagggggtcattttcatcaaggcttgtgcgccgctgggaactgccccgattggcatgtaaaccccagcgaagaagcctgctgcagtaccgacaatggttgcaatgccgctcatggtggtcacgcgggaaacaaagctcaaaataagtaaattaaaacttgtccaaaccacactgctgaacaatgcgagagcaatgattttgccagttagttgccatggaataacgacatgatcaagcagggcgaaggcgcctgacatggcgccgaacatgagcagctgcatgatggtgccgatgatgacggcactggccagatagccaaattgaatgcgcagataagaagcttcggtcaacaggtagtcgcttaaattaccattctcacgatcaacaatcattcttgctaagccatcttgcgtggtcgtaactgccgtgatggtaagcgtgccgccgattagccagggatcaagcagcttttcaggatgactgatgggccacagtccggtcatattctttttgagaaaaaccaaatagagaacgaaggcaatcagtgcgcccaaaactgaaaagaaaacgccggcgcgattgcgaaaaaacaacaatagattacgtttaataaaagctagcattagcgaatctcctttccggttaacgtgacgaagatcgtattcatatcagctggatggaactcaaagtcggtgatggcatcggtgagttccgtcagtaaggcaatagcctgttgcggatgatggatattgacgtgcacctcgttggcaacgatattggcccgcaatccggcttgattggcgactgttttgacgcgatcggcagctgttgtttgaattgtcagttgatgagcagcatagcgatttttcaggtcaacaacggtatctgctgcaatgatttcaccacgatcaatgacgtaaacgaagtcagcattttccgtttcctccaaataatgggttgttaaaatgacggtcaattgcgtttggacgcgtaaagcagccagcgctgaccaaatcgtttggcgcgtctgaatatctaatccggttgacggttcgtctaaaaataaaatttggggatgattcaaaagggcgcgggcaatatcggttcggcgtcgctgaccacctgacaatgtcccatatgtctgattcaaaataggtgccaggtcaaattgcttaatcagttgatcgaaccaagcagtatctgggtgttgatacatgcgcgcccgcaatcgtagattttcattaactgttagttggcgatcaaggacactatcctgaaagacaaccccaatctgttgacgataggccacttgccccggtgtgtgatcggcgacggtaatggtgccactggtcggttgaatcaagcctgtcagcatgccgattgtcgtcgatttacctgcgccgttaggacctaagaaggccacgaattgcccacggtcaaccgtcaaattaatgccgttcactgctactttcggaccaaatgttttggtcagaccctttgcctcaagaatggccattgatgtcacctgctttcgatttgttggccttagcataacgacgattgcgccaagtgtcttgagaaaggcggtaagtggtgcaaaatgcttggcaagtggttgaaaatagcaaatgaaaaatagaattttttcttggcaatttacaaatgagttgggaatgcgattttatcgaggcaacaaaaaacagcttgtgagaatcaagccacaagctgcagatagtttttagctactcaggtaaataaaaagtgcaagatttcagcatccacataaggattttggtgcagcgtcgagtgataagcgccaactggtgtgccagtataaacaaagagggtggtggataagccagccgccttaaatttggcggctaaacgtttgacaccagcaaggctgacggcccagtcaccttttgccccgaagacctgtccgccaatcactaagatatgcaatgttttcggtaacgcccgaatctgggccgttggatcacgatagaactcgctcgcaaacgagacataattgatcacttgcggctgaagattggcatgcggtgtcgtcatgtaattaaagctcagattgctgcccattgaatgacctaccagattcacacgagtcacatgacgctggacgcgaagccagtgcagcaagtcggtgagttgccgaacttccttttgtggtgacttagcatcggcaaaaacaacgttgatgagcggatttttgccattgtagcggtcggctccagtgatcgtgcgtttgccgtcagcactgacatgaatcgtagtgacttgatcggatgccttatcctgcttgaagcgttgaaccattggcccgaaggtgaggctgttactgccataaccagggacaaaaactgtgacgatacccgtatgacgataggtttgctggtgaattgcgcggctgcccagttgccaccaaagccaatagccgccgctagcgagaagcaaaattaccagtaccgatatgcttactcgtcgccagcgttttgctgatttagccatgaagagggtcatctcctgctggacgcttcagttgcttgaaaacgcctcggaaaattggtcgccgattgatcgcttgcacatggcgattattcggttcaaaaaactgctgatagcgggcgagctgattcgaactcattgtgatctcggtttgctcaatgacataccaagtcacgccttcggttaacggcggggtggtgagcgagccgaggtactgataaaccgtaccttgttttggcagtaggagagtcaggtcaaagttgattggctgcgtgacatgtggttgaaaatgatcgagcacatcggccatgatcgggttagcttgaccaactggcactaaaaccgccacgacacaaagcgcaccaatggccgattgatggacaaaatggagctccgccaccgttttctcagcaacgatatgctccgctggcacgtgaaaatgggcctgcacaaaagtccaagtggtttcattaatccgagttgttccttggccagcgagccgaatggtgacctggtcatcaatttcttgatcggtcatccatggtgtgagaatcgtcatgtcagtgtcggcagtggttgtcgcttgacgaagatcaatcggtgattgctggaagccgaaaccatttggccacgaagactgcttggcataattcaaaattgacatcgtgacaatcctttcaaaaaatgaattggcggtgggcagtcgaaacccctgctgttaaaaacgaaatgcaccagaagtcatttagcagacagagactaagaaaatcaaaactagagatgaacttttctctagagccaattttgctcagcaaatcctactgacttctggcgcacatgatgggcagttattcggctgaagaagggatgctttttagttgagaaatttcacagccgtgccatatgcaacaacactttgcatgtcaccgccaattgatccggagtcaaaccgcatcatgacaactgcatcgccaccagctttttgggcttcgtcgcgtaaccgctcgatcgccttttcccgtgattcatgcagcatatcactgtaggctttgatttcaccgccgacaatgttcttcaagcctgcaccaatgttgctgataacattctttgactgtgttgttaagccgaaaacttcgccgatcacttcatattttttgccgggaatgttttcggtggttgtgattaagatttcttgtgccatgagagaatctccttcataaaagttgacgaaacaaatcagtggcgagctatcttgctgcttatcagactaccaccggcttatggtgacaacaagctaaaacgcttagcgtgacaaaaccgttagctagtgtcatcaggtcaacatttttagaaaaaacctgagcactagtttgcctcttaaagaagtttttcccgttagcttctcgtgctagaaaacagacgcgatcagggcgttacttgaatcacaattcggccttcatgcggctcatccagcaattggtggcctttcacaaagccttcgcgggtaaaaggcaatacatagccgactttgacggttaatttgccttgagacataagattaatcaagactttaagtgcttggccgacttcggagccgccaagcggtcgggtatgaatgaaacggatgccgcggttgaggagcggttcgtgatgactgacagatacgatcagcccattgtccttggccatagcgacatcatcatcaccaccgatcccgtccatggcggcattaatcacgacgtcggcggttttggcaagttccttgacaggattcccgcggtcataagcgacaaaatgttcaaccccgagttgattcacatcaacttcatggcggctggcggcgataccaatcaccgaagcaccgcgggcaacggctaattggatggctgcggaaccgacaccgccagaggcgcctttcacgatgacggtgtcgccatcgtgaatatgcccaagttcgaccattcgataaccggtcacgccgggggtgatcagagccacaccgttttcaggcgtgatggactcaggcagtaacacactcatgtcagctgcggccgtcacaagttctgcgtaagcactggtggtgcgcgcaacgacgcgatcaccaagtgcaaattgcgttacctgatcgccgacagcactgacaatgccagcaacatcataacccggcaccgttaagccactgccacccatttgacgagcaatgcgatcacgattattcagaccgatcgcttgggacttgatttgaatttcctgtggtcctggcgctggtgtggccaagtcgatcgcatcaatcacttctggcccgccagcatgactaaacccatatccaagcatcttgttccctcctcattaacgtgctcaccagcgcagttgcctgcacctgaggcagcttacacgccggtttcttttgcgttggttcacgttaagcctctatatatcggcattttacccatggtaagaaagaaaaaacaattaaaacgacctagccgcttaggggtggaaacctcttacgcagctaggtcgctatgaaggtgacacatggtggaaatgaacgaaccggccatcagtagattaccgattttctcttcgcggttggggatcaaaaccatgtaactggcctttaaattcatcaggattttgactgacataagtaccgcgggcccaactggtagcgacagtttcatcaactggttcatcgtgttcgctgtaatccagccccattttttcagcagcaggggagacccgaatgctgacgaattgtttgagaactacagtgattagactgaccatagcaccaactaagacgatcacgatggcggtgccgacaagctggattaggagcagctgccatccaccgccataagccaagccagcgtgcgcaatgtcgggggcgacctgtttgctggcgaacacaccagtcaaaatactgccgacaatcccagcgaccccatggcagccaaaggcgtctaaagtatcatcaatgcctagccgtggcttgattttgctgataaaccagtagcttgtcaacgttgccgcaacgccaatgcatgctgccccaaaactcgtgacatagccagtggccggggtgatcccgacaagcccacacaaggcgccggtacaagttccgatcagcgttggatggccggtttgccagatgtccagacacatccatgtgaccaacgccgcggcggcgccaaccgaagtcgttaatgctgccgtcatcgccgcttgattaacaccgagtgcagagccggcgttgaatccataccagccgatccataaaatggccgtgcctagaagcacccaaggccgattataaggtgtgatatgttcatccgtgcggcgacctagaaaggcggatagcgtcaaggcggtaatgccagcattgatgtggatcactgtgccgcctgcaaaatcaagcacacccagaccggccaataaaccgtgcggactccagatcaagtggacaagcgggtaataaaccagcaatgaccacaagacgataaaacaagtcagaaacttaaaatgcatccgaccaacgacagcgccaacaaacaaggccggcgtgatgatggcaaacatcatttggaacagcacatacacaccggttggaattttcgccgtggtcaccgcgccaagcgaaagatcactcaaaaagaaatgatgaacctgaccgatgacaccgaaaagatcgccattaaaactgagctcatagccgacagcgacccaaagtaggatcgcaatcccggtgatgtagaaaaccgacagcatcgtattaatcacgttgcgtttggaaaccagtccaccatagaaaaaagccagtcccggcgtcataaaccagactaatgtactcgcaataattacaaacccagtatcagctaaattcatctctgccacctcattaccattgatggcggtattgtagcatggcatttttaataacttagcgattcggtcgatctattggcctagagcaaatctggtgctggaaggagaaagactgctatcaaaggattttcgaagcggtaaaaaaaactgaagacgcgttagcttatgtgacatgagaacttgacgattttatggcaagcagaaaaattggccattggtctatgtgcgaaaattggtttttaaatgaatataagtgaacgcaaggtttgaaaactggcgcaggcgccatgcaaaaacacagggaaaggcggctactgattgcgaccatgccaaacacaagctggcagtgtttggtagccctcagtgtagctgttttccctgtgttcctaaacaaacacgttcattaaagttcgccgtctgcgatttgaccgagcacagatttggacggaatgaagaacaattcgccggtttctggtgtggaaaagtccaacagccgatcggagttgtcaaacatgccttgcaacatgcgcttggtaaccatccaatgacgggcatagccgatgaagtaggttccgttttcgtttttggccggattactgaacgggacattcatgcgcacaattttatgttcaacgccgccgtcattatcctgagaaaccacattgtgggcatttggcagcttcttttcgtcagctaactcaatatcgttgaacttctttcgaccgatggctttttcctggtcctccgtcgtcaaatcgttccatgctttcatattgtgttggtatttttgcgcaaaagcataggagccgttttcaaatgtgggatcttcatcgccgatcaccgcatactctggcgtgtcgagtgcgcttggattttccgtgccgtcgacaaagccaatgatcgctcggccttcgaaatagcggaagccatgggtttcatcgagtgtcacagtctgatcgtcaatgatggtcatgatctctgacatgagttcgaacggaacggctgaattctgcgagcgaatgtggaagaacagatcagctggggttgccactgcggtatattttggcccgacaactggttggaattcctccaactctttaggcaccggtgcagctgggaaaagataatcccaagcttttcgcgacaagccaaatgcaaccgccaattttgcatctgggtagcgaatgttcatgctattgatgaatgctggtaagtgctctgctaagtcggcaataatggctttgtcggctgccgcatcttcgcgcttaaggtcaagcgtagcaaaaataatgtcagacccggcatccttatagacatcctgtacatcacgtaaatttatggtcatcgttacgcctccaaattagaatcattctaacctactatagtctaccatagcggtggctgattgcaacgatttcgcgatgtttttaacctagccattcggtggtaaagtaagaacaaaggttgtgattgtttgataatttcagtagcagatcaagccgaacttgtcattcgactggtggtggctgcactttgcggctttgccattggttatgaacgcaagaatcgcttcaaaaatgccggtatccgcacacatatgattgtggcgttgggtgcggccttgattatgattgtttcaaaatacggtttttttgatattttagatttgaaaaatatggcattggatccttcacgtgtcgcggctcagattgttagtggcgtcagctttttaggcgctggcgccattttggttcgccacaataacgtgaatggtttaacgacagctgccggggtttggacgacagcggctgtggggatggcaattggggcgaagctgtacctcatcggcttggccgcaactgtcttagtgctttgcattcaagtcctgctccaccatcattatcgttggctgcccagcggtgataacggcattttgacaattcgggtccgcagcgaaggctttgacatggtacatttacgcgaaacattaggcaagtaccatatcaaggtcctgaatgtgtccattaagcatgaaggcgacgaagttaaaatgaacctgcatgtagaaagtaaagcaaacgaagatatgcggcgcctgctgacgttttatgccgacaatccgaatattatttcgattgaattctaggcaatcgctagttaagttggctagtaccatctgcatagttgagggtcacaccaggctgaacgttgaagatgtagacattaaaatgaatcgtgttgtcgccgatactttgcgcacgcatcaccacaccgcgtggtaacagttcatcaccgcgaaagatcggggtgacttcataacgaataaaatgttggcgtgactgtttcaaataatgtgccatatcatcttcatgggcctgcatcaacggcgaatttaactgccgggtcccagtcatcaaattttttggattattattttcaccggaaagctgaaaaccaattaaatggctgcggttgtacagccattcgccatgcactttcttgttgtgccacccagttggattccaagtcagcggctcgcgcttggcagttggcatgatggcttgattcagtaaagcattggcagtaccagcacggttgagactatcgagattgctaaatgttgtccacgggcctttatcagtggcaagttctgctttcgtaaaaccaggctcgttattgttgacggtaatctcggcagtgttgttgtaattgagctgcgccagttgcgtgaccggctggcgcgaggtggcatccgttgccggcacactgttgctaactgaacttgattgcggcggtgtccccagcagtgaagtgtgttgctgcgtgtaggcataaccgccgctggctaagccaaacaacagcaaggtcgtcgccaaccgccgattcgcccgccgttgccgctttgtgccttttcgcagcaaaagcagaaccatgccagcgagaatgagaatgaatgtgatcaggttattcataatgtcctccaagtgactgatggatgtatgtattgggcgagaaaaagtttagtccactgatgttatgaaaagtataatgctcagtgctaacgtagtattttcaaagggtagagtcagagcggttagaaatcggtacgtttggtgagcaggattggatgtatcaggaaaaattaatatgctctgagctctgataaggtgaacgtatttttcaactaaatcattcaggtgacagatacagttcttgcgagcctttaataacagaatacgccaatgatagagaaacagttttttgaaccgactacttttgagattgctgacttagttatatagccaccgtcctagtgaatgatgttttgtcctttatcagtgaatactacaccaacggacaaaatatgaaccgtttcagaaactatacagtaaatcgcttttctaacaacggtgataaaattgaatcagatgcacgaagcattctaattcctgagggtacattggctgaagatgctgcatatggagcagccttaaatgcctttaaagttaactttaaggtttcatattcaattgatcaggcagctttagcagcaaacgtgtacaggaatatgattcaaagtcatttagaaaactgatgcgcgatccgatactatacgaaatcttatcgctatcttgcgcaatgacgctgagaaaaaggagtgaatctgacgacttattggaagtatttgcacacaatcgttgtgttagccgtacttttccttatatcacttgtatttgctagtcacacaatgattcagacacttcttggtgtggggtcgcttgcttggtttttgctttttcttattagagaaatctatatgaacagtaaacaaacgaagcgaacgaaatttcaagttcgtctatctcatgtcttgattatttttgggttacttttgttcaatgcaagtgtgcaccaaacttttatctctacatttggacaaagcgacatagaccaattttggggtgagcatgaagcagcaatccacatgaatggtaaagcttaccatttgatatggacaaaaagatcatttctaagtagtggctgttgaactaggccaccatatcttcgacccttgtagtaaatttatagcgaatttgataggcctcaccctcgaatttagccaaaattaaaattggtatagcaaatacccttaacagggtcagcacattgctcaagacgatggccgcgtcaatcttgacggccagtgattcagctgtccgagtgttcaccaagccaagccccagcgtgcccttcataaaagcaaaccggcgttcaatggtacctcttcgattctcggcatcagtatcctcacgccgtttcgctgcatcaacgtgttttggatgccggccaagcttcggaccgcagattcggatacccaaatccttacacagctttaggttctcccgattacggtacagcgtatcggccagtacttcatccggataatgtccatgaaggtcgtaatagtggtctaaagtttccgcgaagtcttggccctcagagaatgcggtgaaatcaaaacgttcaatgtcgactacgccttcacttaacgaacagtcaatcttcgccccaaattcaactttagcattggccttaccacgttgaattgggcgaatgtacggctgttggagactaacaattcggtcttcaacgtggtgagtcttgtgggtatacatgtaccattgctggtcaaatagaattcgaatcacgcctaagcgaatcgcttgttcatctggtagagtcgcaccctgatcgatgaattcgttgatgtaccgcaaatcacggcgcacatattgaagttgggccttgacctgtttatgaaagccaccacgctgttgctttggatgtcgtgaaaatgaggtccaacaatgcttcgcctcgcgtttgtacatgcgtgggtttggcacaccaagttggtgtgccatatcgatcgccatcgcctcaagattcagccttgcttggttgaggaggacggtgtcttgaggatacttgattttgactggcactgcggttgcgtccgtgatgacggtgtccactttgaatgggaccaacgcttcgatcttggcgcgtactgtatcattcatgatattcgtaatcagctcggagatatcggcaattcgtttgcgaaagtgtgccaggctggaataattaaacggctcaaccgctttgtattcggacaacccgatgaaatattgaagtgcgggtgtatcacgaattgccgcaaccaccccacgatcagttaaacccatccgttgttggatcaggattgccccatagagtaaacgaaatggttttgccgcacgtcccgcatttttggtgaactccaattggtatgcctcatcgagagctttccagggcatgacctccgccaactggacccactcattgttagagctaagtggggtacttaaaccggcaccaaaggattcaaatgacaattgaagcgggctgtgacgatagaccatacgataacctccgagtagcttcccaaaaaatgcaaggaaaatgcaggaaaacagctaattccaatggatttattataccgcaataatgcatatattagcttaactgcctgaattatagaatttttaagcagccactaagtactacgtatttttataacttgtatgaacgacgaggattgttctttcaccgtgtcaattccaaagtcatctcgtatgcaacgcattcgtccagtcaagctgattacggggctgtcaagacattccttcactacactaaaaagcaaggagtgaaatagttttatacacgtatacccgaaacgcgagcattatcgtttcgggtgttttatattgggtaattgtctgtattcgttgctataaacaatctaagaatagttccggtaagaagttggaaaaccaagaccccttaccggaactaatcttagattgtgtactagctccctcaatgacgtccttctaacttgcgtatttgtgaaactccaaaatatctgctaatatatgtagaaatcttttaagcgaggtataaaattgctcacagtaaacaatgtatcgatgacgttctccgaccgtaagctatacgaagacgttaatttgaaattcacgcccggtaattgctatggcattattggcgcaaacggcgcgggaaaatcgacttttcttaaaatcattcaaggtgaactgaccccaacgaccgggacggttagtttgtcgccgaatgagcggatgagcagtctgcgtcaggatcactttgcgttcgacaatcaaacggtgatgaacactgttttgcaaggttgggaacgactttatcaggtgatgacagaaaaagatgctttgtatgctaagccagacttctctgaagctgacgggaataaggcagccgagctggaaggcgagtttgccgaaatggatggctggaacgctgaaagcgacgcgtctcagctgttgcagtcattgggcattgcggaaagtgagcaccagaaactcatggctgatctgcctgaaggggagaaggtcaaggtgttgctcgctcaagcgttgtttggcaaacccgacgttctgctgctcgacgaaccaaccaacgggcttgatccgcaagcgattaactggcttgagaactttttagctgactatgaacacaccgttttggttgtctctcatgaccggcatttcctgaatgcggtctgcaccatgatgtgtgatgttgacttcggtaagatcgaactttatgtcggcaactacgatttctggaagcagagttctgaactggccttgcaactgcaaagccaagcgaatgccaaaaaagaagaacaaatcaagcaattgcaggaattcgtggcgcgtttctccgccaacgcttcaaagtccaagcaagccacttcacgtaaaaagcagcttgaaaaaattacgttagatgatattcggcctagcacacggaaatatccgtacatcaagttcgaaccagaacgcgaaatcggtaacgatttgttacgggttgagaatgtttctaagacaattgatggtcatgaagtactgaaaaatgttagcttcattttgcggccaggtgacaaaacagggatcatcagccgcaatgacgtgaccgctactgtgctgatgcagctgctggcaggtgagcttaaacctgacactggcaccatcacatggggtgtcaccaccagccgtgccgctatgccaaaagacttgaatcctgaatttgatcatgatgatctgaacattctcgattggttgcggcagtttgcgccacaagacgaacaagataacacgttcttgcgtggcttcctcggtcggatgctcttttctggggatgaagtgctcaagcaactgaatgttttgtctggtggcgaaaaggtccgttcgtacttggctaaaatgatgctgagcaaggcaaacgtcctcatcatggatgatccaaccaaccatcttgatctggaaagcatcaccagtttgaacgatgccttgatcgacttcaaaggctcattaatcttcaccagtcatgaccatcagttcattcaaaccattgctgatcatattatcgaggttgggccactcggtgttgttgaccgtgcggacacaagctatgatgaattcacgcaacacgaaaccgctcaggcccaggtagccgatatttatccggctgataaaaagaagtcaaaggcgtaattgccgatatcaccttgagcgttacaggttgtgacatcatacgcagttactatacaggcgaacaattttccgcagtcagggaaattgttcgcctgtttgtttgctcatggataacttattggaatttataaagatcccagtgccaaggcggagcaatcgtaggccagatggggtcgaagcgccgtctccgctccgctctagctgcgcgtcgccagcccagttggccggagatcgctaagtttggcacggtagggattgttgcatagatcctttctgaattgtttgaattttagaattcttgctcatctctacttcaattttgtttttcaaacccatctgatagataatatcagcataagtaaccgacaagataagtgtgtgtgacccgcgcaagttgttattgaaagtctcaccaatctggtcacatcagctaagaaagcagtgatcaatatgtcacaacccattacgattcttctcagcgtcaccggctttattgttgcgatgattgtcctcaatggtttgttaacctggcagcgacagcaaaaactcaagcgccaattgctagctgactggggcacttttcctgaaaaacggccaaaaggtgagcgctatttaaaagccgcctatcttgatcatgaagctcaagttaatcacgattgccaagttgacgacctgacttggcaggatcttgatatgttagacgtgttcgaacagctgaacgtcacccaaagtagtgttggcgctgaacgggtctatgcacaattgcgggcttatgatttaggtaaaccagctgttgacgaggcgttgattgccttttttcaagatcatcctgacagccgattgaaagtgcaaatggcgtttgccggacttggcatcgagccggcgaacaatagccaactttatctacgaacaaccaccaaaaaagccttgccgaatgcatggcgattcaaagtaatgggcggttttccatttatcggtgtcttgttgacgctattgtggccggcaattggggtgaccgtgatggtggtcagtttgctggtcaacgtgttctactacattttgaaacgtgaaggccttgatgccgaaattacgtctatgggttaccttgtccggacgattatcacagcagaacgtctcgccaaaattacccaaccgactcaagcagcattgcgacaagcagttaaaccaatgcgcggcatcacgcgatttgcgtttgtcttccggaccaagaccggcagcatgggcgacattttaactgagtatcttagcatcatgttcatgctgagctttattgcctacaacacagtgctcgatcgcttaagcagccaccatgctgaggcactagccctgtggcaacggctgggcgatttagagttggccattgccattgctaattttcgcgcggcggaagcgactacaacgcagccagtctttgccaaaggcggcatgaccgccactgacttagcccatcctttgttgaaacatcccgttgccaacccagttgactggcagaaaaatgcgttgatcaccggcgccaatgcttccggtaagtcgacctacgtcaaaagtattgcgatcaatgccattttggcacaaacgatcaataccgtgacagcgacaagtttcacgatggagccaggagaagtcatcacggctatggcggtgcgtgatgatctgagtgaaggcgatagctattttgttgcggaaattaaagccattcggcggctgctcaatgctgttgccaaaaagaaacgcgtctatggttttatcgacgaaattctaaaagggacgaataccgtcgaacgaattgccgcttcggcgagtgtcattaattggctaaagcaatatccgagtttggttgtggtcgcgacacatgataatgaattgacggacattatgggcgatcaatgcgtcaactggcattttcaagagaaagtgacgaaggaggatggcgttgtctttgactatttgctctatcaaggtccggccacttcgcataatgccatagcactgttggcaaccatggactatccaacgtccttaattcacgatgcgcggcagttggctgcggattttgaacgtagcaaagcatggcctaagtttgttaaaggagggattcaagcgtgacagatgcagacaaaatatttgaggctattcgtcaggatcccgataacgctgactttaccgcccaaggatgggatccgctatatcatattgaacctgaagcaacgatcctcatcgccagtcaggcaccaggacgaaaagcacaaacgacaaaaacatactggaatgatccaagtggtgaccgcttgcgaacttggatgggcgtcaccaaggatcagttttatcacagcggaaaaattgcagttttgccgttagatttttattatcccggcaaaggtaagtcaggtgacttgccaccgcgtaaagatttcgcggccaagtggcatccttctttgttagccttaatgccaaagattcaacttacaattgtgattggcgcctacgcccaaaaatattatttaggaaagcatcgcgaaaaaacgctgactgccactgtcaaaaacttccggacgtatttacctgactattttccgatcgtccatccttcgcctctaaactatgggtgggttaaccgtaatccatggtttatgaccgatgtggtgccggcattacaggcgcaggttgcagacttgatgaagtagaatgaattaatgtgacgcgctcgcaggagtctacacataccgaccttgaaaaagtcaggtcatcattcacagccctcaaataaatgcgaacagattatcgcaaaaggtttttgtcgtcctacatctcgtgcataacttatccggatataaagatgtcagtgccaaggcggagcaatcgtaggccagatggggctcagctgtgcaaacaacacagcgaccgggctttgtcgctgatgttgttaggcgacttcgagaccggtttttgggctcgaagcgccgtcacgctctagcttcgcgtcgcaagccccagctggccggagattgcggagtttggcacggccggggattgttagcctagctcttttctggattatttaggatctgacaaatcataaggtcacttacgttttgattttcaggtgttactgtgcagtcacaaaaaagctgagatcacggaaacgctccgccgcgatctcagctttttaagtagccttttgcttgaataatttaacgagtgattgaacttatggtaatgtcacgaaaatgagtgcgccaacaacgccgccagctaaaggaccgagaacaggtacccacgagtaaccccaatcagagccgcctttatgtgcaatcggcaggatggcgtgcgccaagcgtgggccgagatcccgcgccgggttaattgcgtaaccggttgtccccccaagtgacaatccgattgcagtgattaaaacgccaacacccatcggactcaaacctgctgtccatttgccttgcgcaaaagctaataggccaaaaatcaagacagcagtgccgatgaattcagacaagaagttagcggtatagttgcgaatggctgggccggtcgcaaaaacgcctaaggtggttgcttggtcattggtcttcgcccagtgtggatagtaatgcagccagacaacggcggctcctaagaaggcaccaagcatttgggctgcgacaaacggcagcacccatgaccaagaaaattgaccaatggcggcaaaagcgatggtcaccgtcggattgagatgggctgggccaaggaaagccgcggtataaacgcccatggtgacagctagtccccaaccaagggtgatggcaacccagccagcatcctttgcttttgattggttgagtgacacgccagccaccacgccgtcaccaaggagaatcaggatgaaggtgccgataaattcacctaatgtttgtgtccacatgttgattcctctttctattcaggatgaaccggtgcgggtgccgtttttagataggccagttgactgtcggcaatggcagcattcaaggcggccagttgttgggctttcaccgagtcgtcccatcccagtgtttgcgccatttcgtcaacaaccggctgtttcaactcagccagtgtttcagcgtggaaaagtagggcattggttcggcgcaagagataatcaaccggtgtgagcgtcatttcctcattgagtgaataacgtagactcatggtttccttcagacttaatcctggcgcaggaccatcgacagcgtaagtgagcactcggctggtattggaaccgaagcggttagccagatcttgggcttctttttccgataaaccagcatcaacgccaatccgaatgtagaaggccatggtttcttcaacattggtcggatcaaaatgtccgccggaaacttgcagctttttggaatcgactgctggcgcgtcaacgttgaaacggtcgaccagaatacggcgaatcagtgcgagggcaccagcggccattttccgatagtctgtaattttaccaccggaaagggtgatgagcccgtatgtcgcttggtgaagcgaactgccgcgagaaacttgggatgggcttaatccggcttctgcatgtgctgtttccagtttggaaatggcacgttcaacatcggcgcgggttgcttgatcgtcttcataagcgttcacaacctcgatcaaggccgtgaatgaatcgtctgaaactttgccgctgttagcaccgccgccgttataatcggaactaccgttgtcgttgatcagtggtcgcaacccagcccaactagcttcaatatcgtcgatcgtcatatggctttcagggaagcgtttattgacgactttcagcagataatcgacatcttcttgctcaacgcggggatgttcataatcgccggtataatctgtatcagtggtaccaaaatacgttttgccttctcgcggaaccacgaagaacatccgaccatcgtttaagccagtatccatgtaagttggttgcggaactggcaagcgagaaccgtcaacgactagatgaacacctttggttggccgcaaagttggcgcgtgtttttcgtgatcgtcaagtgcattgaacttatcagcccatggaccggttgtgttgatgaccagtttggcatggatatcgaattcagtgtcgtccaacaagtctttaacatgcagcccaaccacttgaccagcgtcattgtgcagcacgccgaccgctttaacatggctggccatcaagccgccaagttcgtcagcttctttgatgttttcgatcacaaggcgtgcatcgttgttgacgaaatcgagataaacgccaccgccttgcaggttatcagcggacaattgtggttcacgttgaaggacttcatcttttgtcacggtataattggcgtactgagaaccttcaacaccagccaatcgatcatagagatccatggcaattttgacgctgaacatgtcaaacgtactgccggattcttgataaattggcaacagcattgggaatggccgcgggatatgcggcgcgatcccttgcaccacggcgcgttccttaacagtgtcagcgacaacgccaacatcaaaagatttaagatagcgaataccgccgtgtaccaatttggtcgaacgcgaactggtgccttccgcaaagtcctgcatctcaatcaaaccggttttgatcccgctggcagctgcttgaatcgccaccccagcgccggtaatgccgccaccgacgatgagcaagtcgagctcggtatgctttaactgatgaatcgtttgtttgcgcgtttcgttggaaaataccattttgttctccttcattacggatcgagtcagtctcgatcattttttggttgacagatcaggctttcttcgccttgtgcttatacatttgggttgcagcaacagcttgctgccagccttcataaaggtggtcgcgatcaagcgcacccattgttggttcaaaacgtttgccaagcttcacgatactttgcagttcatcggtattgttccagaagccagtcgccaaaccagcgaggaaggcagcgcccatcgccgtcgtttccaaattggctgctcgttcaatcggaatgcctaaaatatctgcttggaattgcatcaggtaatcgttgttagctgcgccgccgtcaacgcgcaaagcttggatcgggataccagtgtctttattcatggtatccacgacatcacgtgactgataagcaagagattgcaaggttgctttgatgaaatcttcgcgagtcgtgccacgagtgatgccaaaaatagcaccgcgagcatcagaattccaataaggcgcacctaagcctgtgaaggctgggacaacataaacttcattttgactcttagaagcccgtgcggcggcttcggagtcgcttgaacgctcgaccaacttcatggcgtcccgcaaccattgaatcgcactgccggcaacgaaaacggaaccttcaagtgcataggtcaccttgccatcaagtccatagccgatggtggtgagcaggttgttgttggacaaggtcggtttttcgccggtattcatcacaatgaatgcacctgtgccataggtgtttttcaccatacccggctcaagcgccaactgaccaaaaagtgctgcttgttggtcaccaaccatgccggcaattggcacggtactgccgaagaaatggtaggctgctgcattgccgtaaatttctgaattgctgcgaacttccggtagcatttgcttaggaatattcaacaattggagaatcttgtcatcccaggctagtttatggatgttgaacaacatggttcgtgaggcgttggtatagtcggtgacatgaatggcgccgccggacagcttccaagaaagccaagtatcgatggtgccgaaaagcagttcgcctttttccgcccgttcttgcgcgccaggcacatgatccaaaatccagcgaatcttagtcgctgagaaatacgaatcaattagcaaaccggttgaatcatgaatcatatcgctgtggccatctgccttaagtttgtcagcgatctcgctagtttgccgcgactgccagacgatggcttgtagattggcaacccggtctgtttgtcccatacaaccgtagtttcccgttgattggtaatcccgattccgacaatttggcgtggctgaatctgtgattcaataaacgccgtcgcgatggtcgacaaagcggcattccaaatttcattggcattatgctcgacccatcccggatgcggaaaatactgcggaaattcccgctgtgcatcaacaactttttgaccattgtgatcgatgatgatggtccgtgtactcgtggtaccctcatcaatcgccagaatgtacttctgatcacttgtcacgaataactaccccctgtgaaataatattgcacacaatgaaaacgtttccagaaatagttataccgtatctcgtgacattctgtcaactttaaacttatgtgtatcattagttattttaaaaagttaaaaaatcgatcaagattctgtaaatgagatggaaatggaggttgtgctgcaaatgagataacttgaacaaaaaaacgcgtggccgacgaacgttttcatcagccgcgcgtattttgcttaggatcgtctgacctactattggatgagctggcgcatgcgatggatccgctcaaaaatctggtcttcctgacggcgatcagcccaagaaaaattgtgcatcgtactgtttgggcgattgaccttcgtgtacaaaatggttggattataagcatatttgccaggcgtatgcgcgacaaaatccgccgtgaagtaatagtcctcagcaatgcgtaattgttcatcatagcgaatattaccggcagttaaagcatcacgagagaaagccttgttccaaatataaccgcccacttcggagccgtggcgtgagacttgatcaaacatttcgcgctgtgacaacaattggaagcgattaggcccgccgcggctgcgatgccaccaatcataaccaaccgcagtggccacaacacccgatgtgaacccgtgttataacgttccggcaaaggtcggcgcgattaaatcgtcaccgtcaacaaacgccacagcttgaccagtggcacgatcaatgccaaagtttcgtgcagcaccgatgccacgatggtgattaaaaccggtcgcgtgaaaattagggatacctttaacaaaatcagccactgtctgagcggtaccatcagtcgaggcatcgtcgatgagccaaagttcaaaatcaattgtttgttgctggatactttttaatgtctcaggcagataatgacctaaattgtaagttggcacaacgatggttaaatctaagttcgacataattgcctccttgaagttcgttttgatcattatcgtcaaattacgggtaacgtcaatcaaaatgattcatgtatgaagttgggttgttgacatggggaatgctaactatcggcgccatgtggaagggacattctgaacctgctagaatttttagtaaaaggaagttgctttaaattcagcgatttttaaatgaccggtaaaacaaaaacaaaaaaatttggctacagcgcttccaatccgtcattatttttagtaaaataaaaacggttacaaaaatcagtagcggataaataagcttaacttcaattaggaggtattgacggtgaatagtacagatgtcacgaaaggttttacggaacaatttggtaagcaggcggagcacactttctttgcaccaggacgcattaatttaattggtgaacacaccgattacaatggtggccacgttttcccatgcgccatttcgttgggcacttatgcagcggttggcaccaatgaggacaacgcttttcggttatactcggccaacttcccaaaggttggcattattgacatcccattttcggatcttttccaagataagcgcggcttgtggacagattacttccaaggtatggcgcgggtgatgaagacggcgggtgcgaacttcacgcatggcctcaatgtctacatcaacggcaacttacctgatggcgctgggttatcaagttctgcttctctggaaatgctggtcggaacgattctgaacagtctttttgatggcggctttgaaccgttggagctggttcagttcggcgttaaagtcgaaaacgactatatcggcgtgaactccggtgtgatggatcagttcgcgattgaaatgggtcacgcaaatcaagcaacgctgttgggtacaaacacgatgaaatacgagtacctgccagttgagatgggcgataacgtgattgtcatcatgaataccaacaagcgtcgtgagttggctgattccaagtacaacgaacgccgcagtgaatgcgaaaaagcactggcaatgctacaaaaaggcattgaagtcaaaagtctgggccaactgagtgaagacgaattcgacgagaatacttatctcatttacgatccaatcctgatcaaacgcgcgcgccacgccgtctttgaaaatcagcggacattgaaggcttcgaaagcactgcaagatggcgatttgaagacctttggcaaactagtctctgcttctggagtttcgttggcttttgactacgaagtcactggcatcgagcttgatacccttgtgaccaatgccttgaagcaacggggtgtgctcggtgctcgcatgaccggtgctggctttggcggttgcgccattgcgattgtcaacagtgctgatgttgaagactttattgataatgttggcaagacttatcgagaaaagattggctatgacgcccatttctatgtggccgatattgccgatggtgctaagcaactgaactaactctgctaaaatagaaaaagtgttataaagtagagcgtgagccagaccgatttctagtctgacgaacacgttttaaaaaagggagatattttattatgacaattgcagttttaggcggcgctggttacatcggttcacatacggtaaaacaattactcgctgccggcgaggatgttgtggttttggataacttgattactgggcatcgtaaggcggttgatccacgcgcccgtttttatcaaggcgacatccgcgactatcattttctgagccaagtgttcagtcaggaaaagattgacgggattgtccattttgcggcgttctcaattgtgccggaatccatgaaagatccgttgaagtattttgataacaacactggcggcatgatcaccttgcttgaagccatgaatcaattcggcatcaagaaaattgtcttctcatcaacggcagcaacttatggcgaacctaagcaggtcccaattaaagaaactgatccgcaagtaccgaccaacccatacggtgaaagcaagttggccatggaaaagatcatgcattgggctgatgtggcttatgggctgaagttcgtggctttgcgttacttcaatgttgcgggtgcgatgccagacggttccatcggtgaagaccatcatccagaaacgcatattgtgccaattatcttgcaggttgcagcaggtacgcgaactggtttgcaaatttatggtgacgactatccaaccaaggatggtaccaatgtgcgtgactatgttcatgtggtcgatcttgctgatgcccacattttggccttgaagtatctggatgccggcaataagtcatccgcgttcaacattggttctgcgcatggtttctccaaccttgaaattctaaatgcagcgcgtaaggtgactggccaagagattccagccacgatgggcccgcggcgtgccggtgatccaagcactttgattgctagctcagaaaaggctcgtgacattttaggctggaagccaaactatgacgatattgacaagattatcgaaaccgcatggaactggcacgaaaatcacccagaaggatttggtgaccggaattgaccgcgattagcaatcacgttggtaccattgtgaaactcaatcccgattacacccagatggatgcagtctatctgaccaacaaattgttgaatttgatcggagatgctgcccttgacctgcctggtgatgctgatccattgacgaaccttgatctgatggtgaaagctgcgcaggagaatggtaaaattccagattcacaggcagcacgtcagattttggaagcgcagctgatggaccttgctaccccgacaccaagtcggatcaatcaactgttttgggataagtatcaggcgggaccacgggttgcaacagactggttctttgctttgagtcgcgcgaataattatattcaaacgcgagcgattgctaagaacgttgtttttccagctaaaactgaatatggcgacctcgaaatcaccatcaacctgtctaaaccggagaaagatccgaaagacattgctgctgcggcacatgccgtccagtctggctatccggcgtgtgccttgtgtttacaaacggaagggtatgccggtcgaactgactttgcggcgcgaaccaatcatcgcattattcgctttttgcttggcggtaaaacatggggattccaatattcgccatatgcttacttcaacgagcacgcgatttttctggatgctatccatgaacccatggtgatagaccaaagtaccttcagcaacttgttgtccatcgtttcaatgtttccaacttattttgttggctcaaatgccgacttgccaattgtcggcggttcgatgctgacgcatgaacattaccaaggcggtcgccatacatttccaatggccaaagcaccaattgagacgcaggttgaaattagcggacatccgcatgttttcgctggcatcgtcaagtggccgatgagtgttattcgcttagtgagtgctgattcggacgagttgataaatgcagccgaacatgttcggcaggtttggaatcagtataccgatgaaacagttgacgtccgcgcatttgttgatggcaaaccgcatcatacggtgaccccaattgctcggcgtgttggttcggaattccagctagatttagtgctgcgcgacaatcaaactagtgcagagtatccggatggtattttccatccgcatcaggacgtgcaacatatcaagaaggaaaacattggcttgatcgaagtgatgggacgtgccattttaccggcacgattaaagtcggagttagctgaagttcagaaatatcttttgggtgaagccaacacgatgaaaccaatgcatcaagcatgggccgaccaactgaaagcaaaatatgattggacgccagcaaatgcagagatacaaatgcaggcagcggttggtcgtgtatttgcccgggtcttagaagatgctggtgtgttcaaacgcgatgaagttggtcaaaaagcatttgctcgcttctgtcgggcactgtagcaacaggctacgttgctgaagccggcaaggagtcaatggaaacggagaaaacgatgaccacgattacagatattgcgaaggcggcaggggtttcaattgcgactgtctcgcgtattttaaattatgatacgacgttggctgtcacgcccgaaacgcgccaacgcgtgttgaaaacagccgaaaagctggcgtacaaaccgcgtcgacgtaaacgtgtgtccccacaaaccaccgttgccttgattcagtggcgcagcgagcaagaagagctgaatgatctgtattatttacagattcaatatgctattgaggcacgggcggcctcagctggctatcatttgcagagtttgcatttggagcagttgggagccgagacgacacaaaacgtccaaggtgtgattgcgttgggtaagtacgacgctggcgaagtggcaacgatcaaagccttggcgcaaccagttgtttttgtggatcaaaatatgttggcatttgactgcgattcggtcaccagcgattatgccggtcctatcgagcaaattattcatcattttcaatcggtagggatcaacgacatcgggttttttggtggggttgaaacgagtcgcagcggacgcgagcagtttcaggacgtgcggacagccgcgtttgatcgggtgatgtacgcagagaatttgatgcagccagcgtttcgttttattggcgcgttcacgcctgattcaggttacgaactgatgaaacaagcgatcaccaaactcggggacaccttaccgcacggtttcattgtggccaacgacacgatggcagtcggggcgttgcgcgctttgaacgaggccaagatcgaggtgccgcaacgcgtctctgtgatcagcttcaacgatgtggcggtcgccaaattcacgaccccgccactttcaacggtgcatgctgccactgaccaaatgggccaaaccgcggtcgaattgttgcaggcacgcatcaaagatcccaagcgtgtaccgcgtcaggttaacttcaagagtgagcttatgatgcgagccagcagcttgtaggaacggtatcataacgtgttcccccgcgaagaaacctgtccataatgacctcaagtgcaatgaccaaaagcgggtcatcatacttgaggtcagctgatgctctggtttctaaccgcgctggcttacgctcgtttataaaggaggacaagatggacgtttcagttgaaccatacggtcagtatcaaggccacaatttgtatgagctgaccttgaccaatgatcaaggcatggttgtgaagttgttgaattatggtgcaaccttagaaaaagtgttgttaccagaagctgatggcttgcacaacatgattctgtcactaccaagtcgggaagattactcgaaagagcgcaacttccttggtggcacagtgggtcgaattgttggccgtattcgtggtcatgtttggcagcatggcgatgtgaaagttgatctgccaatgaacgaaggcaagaatcacattcacggcggggatgacggtctggatcggcaagtttataacttccgtattgaccagacagctaccacagccagtgctagttttacctttgttgatccagcagggcataatggctatccgggcaacgtcaagctgcaagtgacttataccttggagaatacgaataccttgcattatcgtctggatgcagttagtgatgaagaaacgctcttcaatccaactaaccatacctattttgcgattgaccagccaaacaaaattgatgccaccacgctgacgattccagccgacgattacaaaccgcttgatgcagaccatctgccagatcaaagctggcagccagttgccggaacggtctttgattttcggcaagggcaaaagcttggcgatgtcattcacactcgagcagcgcaaatcactgcagaacggggcattaatcacccattcctactgaaacacggtcaaaccctcgcggccaaactccagactgacaaacatactatgaccctggcaaccactgcgccgtccgtcgtcgtttacaccgccaaccactttgacggtaccggtattcctcacaacattgatcaatttgatggcgtggctcttgaatgccaatttgctccggtcagcggcgatgatctttcggcgatgacattattgccgggagaaccatttacgttggtgaatagttgggcgtttgaataggcagcttaactttttattgcctcgggatgttctgaacgaacctaatctttataaagaaagaagccttccaaatcattggaaggcttttttgacgcaacgagaaaagtttagaagttcttgtgttaaactgcttttttggttagcattgtgaacaaatagtttcaagttaatacataaatggttacgcggtcaaaagacatgcaatgtgacaaaaggagtcgatagcatgaagacaaagtttcttaagttgccggtctatcaacaaggacttttcttaacgttgatttggctaatggtcgggattggcgtgatgctatatcgctggccaacaagtgatcaggattttcaaacaaccgcctattggcttgcaccgaatttgattcatatgcaaggtgaggtgaccgctcaatggtttccgtttgcgtgtgcagtgacggccggtgtgagtctttatgtcgtcaagcatattaaaagtagaaactgtgacactagagaaggcctttatgtacttcagaatttgtggcccatctggttggtgacaatcgtagtatttttcttattaaatctttggctaccacaaacagggatgactcgtttttcgagttttgatcgacaagtactcacgattgcaatactgtttcttgatattactttatttagttcttacatgctttggttaaacttctgggtgccggttggccgggtacataatgtcattaaggttctattttgggcagtgcttttccttggagctggatttattatgagccacattcaatttacgtttgccagcagctcctttagcttggacgatctaggacgacgtacatggttaacactgccattttggccaagctggtttttaggtttactattaacggcggttatttggtggcacacttttcgtcgacttcgaatgacggatgattctcactaaaatagagagaccggccgtgctcacacaactcggcaaaaagattgagggggtctaactgctgacaagcgtacaacctagtcgggcgaaccaactatccaagataaacaatcaagccttaaaaaaaaacgctttttgtaaaagtaaacgctttcaactataatttagatagcgatatgaaccgtttacgtaactaatattgaacgcgtaaaaatgttaattgggcggcaattagggaaggagactttctcatgaaaatgaaattgcaacgcctaccaattgcactacaaggcatcgatctaggcgccatctggtttttgcttgctatagcattcatgctgtataacactccgactgcaaaaaatgaagtaccaatccccttttcaccacttgtaccgcagatgtttcgagtagatggtgttgtaacagctgactggttacagttcactttctggttcattctttttctcacgtggtacgcgatctatcgggttgtcagactaaatgaccaaactcatacgcttcaaccggtgctgcgagcggtcgtaccaatatgggtatttgcaattacaatcgtctttatagcaactttctggacgccgataattgggctaaacggcttgtcggttgttgaacgatccttagtaacactggggttactagttttcacagttctatttgtgggtgcatttcggttgtatggtgagattttacgttacagttcgagacaagggaaagttttcagaataatttgctggtttacacttctttgcgcgtcattctatgtcatatggcatctacagttcaccgttcaaggagcgcccattttaaaaaatacgttcttgttcggtggtctcagccaagacgcttgggtcgtacctttttggccaagttggctgattggcatggcgcttgtttccttaagcttgttaattatcagaaaaaaagcaatcaacattcagtaccgcgaaaaaacaatgtagtcgataaaaattgcaatatatataaataaataggttccaaaacaaatagccggcaatctaattgccggctatttgtttagatttgttcttttatgttgtatccaagagaaatattattgatagcgacttcgactttgcaaagtcatgttgctggcctaaaagtttgtagcaacgaggatgaggaggaggctgatgtcttataaattaatttgccaatctttcaaagattttcttgattactgaaagcgtttgaatataataaagagtgaacagaaacaaacattaattaacaggagttgagagaatggctaagacggttgagaatgacctttttgatgaagcgttagcatttgtcgaggatggtgatgatcaggatacagtctttaagcaagtttccgatcaattactagtagccggtgccgttaaaccggacttttatgaacatctaagcgagcgggaaaagaactatccgacaggcatcgatatgagcgttgtgaacgctgaatatccgaatgtagcgattccgcatacagaaggcgaattcgtcaatgttagaaaaattgttccgatccgcctcaaaaagcagatcgaatttgccaatatgattgcgccagatcaaaaactcaaagttagctttctgttcatgattttgaataatgatcccgagggccaggccaacgtcttggcacagatcatggattttctgacaacatcttctgctgaaacattagctaaattattcggagcagacgatgcggcaacaatttacaacgttttggcaaccagttttaaaaaataaggaggaagtttgttatgacagtcaagattttggcagcttgtggtgcgggtgttaattctagtcaccagatcaaagatgcaattgaaaaggaatttaagaagcgcggctatagcgttcaggcagatgccgtgatggtcaaggatgttaatgaagacatgatgaagaattatgacattttcactccaattgcaaagaccgatttaggctttacaccggcaattcccgttattaacgcaggtccaatcttgtatcggatgccagcaatggcgaaacctgtttacgacaaaattgaaggcgttatcaagaaggaaaatctgaaatagtctcatggtctgatggcgatgaaccgtcagatacatataaggagtgagaaaattcatgcaaaccattattgatttggccaatgcggtcttcaagccagttattgatttaggggcagcaccgattatgctgatcgtgctgaccttaattgcttgggcggttggtgttaacttctttcatgcgttggaaggcggcatcaaacttgcgattgcgattaccgcgatcgggagtgttatcggtttattgacaaccacctaccagccggcgttaaatgctttcgttaagtctacagggatcaatctttcaattactgacttaggttgggcgccactcgcaacaattacttggggttcgccgtatacattattcttcttagcaattctggtcatcgtcaacttgattttgttattcttgaatcggacaaatacgttggatgttgatatttttgatatctggcacttatcatttactggtttactggctatttatttcggggctaatctctttattgctaccatcttggtcatcttcattggtattttgaagattatcaactctgatctcatgaaaccaactttcaacgacttactggacgattgggaaaatccaatgacaaccacgcatttaaactacatgatgaatccagtcatcatggtgtttgataagttgtttgacaaactgttcccatggttagataaatatgattttgatgctgcaaaattgaacgaaaagattggtttctggggcagtcgttttgccattgggatttatcttgggatctttattggtttgatctcccaccagagcgttaagtcaattgcgacactggcctttatggctgctacctgcttggagctgtttagtattatcggttcttggttcatcgctgctgttgaaccgctgtcacaaggtgttactgattttgccaacaagcgtcttggcggccgtatgttaaatatcggccttgactggccattcttagccggccgtgctgaaatttgggccgccgctaacgttttggcaccaatcatgttacttgaagcattgatattgcctggcaaccgcattctgcctttaggtgggatcattgccatgggtgttaccccagccctgctggttgtcactcgcggtaaaattattcggatgatcgttattggtgcgattgaactgccactcttcctttgggcgggtactctctcggcaccatttatcacacacacagcgcgtgcattgcacgcacctggtattcctgcaacagggctcttttcttcctcaactaaggaaggtccaatcgaacaattcatcgctgtgcttgttggtaaagcttctaagggcgaaatgatgatggtgctttacgctgccctagcactgattgcatacaccgcattattcttctggtatcgtcacgaaatgatgaagcggaatcagaagtactctgatgaaggtaaagaagttgctgacgacgttaagttcgttgcaacacacggtgctgcaggatccgcggactaaatttcttaaatcttttaacttacagcttcatcatgagatgcataaagagcctccatcgtttttgatggggctctttttgtttcatcaatggtaaatagacgttattactttttgagaaacaagtagaaggacattttaaagaggcacaaaaaaagtcgcgatggccttcgcgactttacgtgatgattgaataaaaatggctgaattgatttaccggcttgcccgattctcacgacgctttttacgatcaaagacatggtccattttgagtagctgatagagggcatagcaggcggtgaccatcactaatacttgtgtcaatgagtttttaaaaataccgttcatgattgccacgaatgtcacaagggccaaccatagtaagtaagtttttctacgagccgtcatcagattacctccattggcttttgaataactctattataccgaagctaaagcgctaacactagtcaaaaaagaactaaaattaacaatttcgaacagctaacacagctcgtattattgaggctaaataaggttgtgggttaataggcatcacctgcattgaagtggtaaagcgcggagaactaaaagcaaagaaaaataaaaaaagctccaactgcatccacaaaacgcaatcggggcttctgtttacttgaaaaatataaagctgttacagtctaataaatcgaattaaagtcttgctccattctcaatggggggactaaccacgttctttcgatgaagggcgtgagtgcgatgtcaacgtgggctggtggacacgttaaagtgacagagcacattttggatgctgtctgagttgttaacataggcgcattcggccactgtaacttagtctaaatgcttcacctgaacgagttcgccggtgacgccaacttgaataccttgcttgatcttgtctgtccgacttgcatggacgacttgaaacttgttttgcttaacgattagcttgttatcagtgtgatagtcggctggcaatggttggttgctgccgcgcacaagcatcacgataaacttgaagccgctggcatgtgcttcgcaagggctgtaatgaagggtgtcactgaagaattcaacaaccgttccagccgggacgaagaaaagcttcgcgtctttttcggcattgaattggtcgtcgtgaatctgtccgcgcttaccgatcaccatgacaacatcggtgaagaaaacgttcacttcactgccttgatggaattcaaccgcagtcaaagcttccgcgtggccagcacattctcccgcttcaattggcaagccggcgtaaacatcacgaccaatttgctgcaccacgggaatcttttccatgtcgggatttgacgggacgtagagattggcttcactaggggcggggatggtgacatgctgatccatgaagtttttgagctcactgacgtcatactgtgcgtaagtgacgccatagtcggcaaatgccgtctcatctaaactatggatcgttttatctggattaagggttctgagctgatcaatggttgacatagatggacttctttctgaaagttaataggattcgatggtgactttggcaaaatattcatcaaacttagctggattgacgaagccggtttctgcttccatggtgttcaacatcccggttgtcatcgccgttttcatgatgtcttcatccgatttgccatcatgaatgcccatggctaagccagccaatgttgagtcgccggagcccacaggattgacgaccttaatctttggaatggcagcgtgatagaacttatccaaatgttttacgaaggcaccagccgcacctagggacacgactatccaatcgacaccatcaaaaatcgggtccatcagatcgtgtttcaaggccgtgtagtcggttttgtcaacatcacggttgagcaggccgccaagttcttcttcgtttggcttaatcagcaacggtttcacaggtgcttctaaagcggattttaaagtggcacctgatgtatccagaaacactttgacgtttttttgacctgcatgggcaatcatctgggtgtaataatcagccggtaatccttgcggcatggaaccggagatggtgatcaaatcacttttgtctaacaggctgtcaaaatggctaagaaatttctcggcatcttcggcagcaattgttggtccggcttccagaatttcagtctgttcgccgccatcatgtaacatagcaatcgaactgcgggtttcggcatcaatcgggaagaagtcatggtcaataccgtcacgatcaagctgattttccaaccacttgccaaaatagccgccaataaagccagttgctgtgatctcgtgatttaacatatgaatgacgcgagatacatttaatcccttaccgccagcagttttccgcaccgttttcacccgattgacggtgtcgattttgagatgttcgagcgggtaggagacgtcaatggatgggtttaaagtcactgttaaaatcataagtattttcctccaaaaatgtgatgatgagctgggtcggatacaaacctaatcacggaagacgttataaaagccgattccctgaggagtcggcttttatcgtcttcacgcgaattaggcgtgttcgaccttgtccgtccaaggagttgccgtttcagctaagaccttgtttaagcgatcgatgtttgctttgccttcggtttccagccatgctttaccagcagcttcgccttcagcagcaaatggcttcacgcctggcttccaagttgcccggccgcaaagaacaccattgaaggttgatcctgcttgcttcgcaaatttcaattcttcgaggaacaattcgtttgaaacgccggcagacaggaaaatgaatggcaggtcggtggcgtcggattgggctttgtaatacttggcagcctcctccttggtgtaaaccggggtcacgccttcatctgtgaagccttcgacaaacttctgatcaactggaacctcgacttttagaacagagacattgtactgtggtttgctgaattccttggtgatcttgatcaccttatctggctttacctttgcccatgcagccgtcccagtttcattgagggtgccatcgtaggaaaccagttccaagaacaatggcaaatcgttagcctttgcttcggcaccaacgcgttcaacgaaagcatacttgcgatcattgatggcgtcaggttcgtctggatcgatataaagcaagaatttaacggcatcgccgccttcattcttaatgcgcaacgcactttgatcatcaatcagatctggaaaacggccaggttcggtagcatcataaccggtcttttcatatgaaagcagcaggccagcttgaggggcacgaactttggcagccggcagaccatattccgggtcaagcagaatggagctggcatacttggttaattcttcggaaacagcctttttgaaatcaacaatggtggtttcatccgctggcttgttggccgctgctgcaagcatctttttcaaggaaccgcgttgatcaatggccagagcagagatgacgttgttgtcatcggacaattgttgcaaatgtttgtattggccagcagtaagggtgacagtcatgtagaaattcctcctaagaaatagtgtcgaagtgataattagtcgtggtagacgccttcagcccacttttcgagttcagtatcgaagaagtgcggattgtctttttgttctggatttggcttagcaatgttatcaattttatcgatgattttcttgttctgaggggtttctttataggtggcatccagataagctttgacaatatcttggatcatatggataccaactgtggcaccaccgatacccaatacattggcgtttaattgttcacgtgcataaacagccgaggtcacgtcatcacacatagctgcccggatgccgtcgtttttgtcagcggcggttgaaataccgataccagtaccgcacattacgatgcctaagtcagcgcggccgtcagcaacatcttcggcaactttcttaccgtaaataggatagtgggtacgatgggtgtcataggtaccttcatcaatgacggtatagcccatatcttttaacatgttcgaaatttcaattttctgcatcgtgacgatgtgatcgttaccaatagcaataatcataagtgtgaagcttcctttcttcttttaggctgagggcaaggggattaaatcattttttcaagcatgtcaaggcggatttggtgacggccgcctgcatattcggtgtccagataacgttggatgatcacaagtgcacgatcataacctgtgatgccagtgccaatagcaattgccttggcgccattgtgttcggcggtcatatgggcggtgttttcttcttcgacaaccgcggtgaccatgcccttaaccttgtttgaagccattgctgagccaacgccgtaacggtcaaacatgatggctttatgtgcatcgccgctcaacagttcctttgtaacagccaaagatgaatcaacaaaatcttcagcaggttctggggtcatatccttaacccgatactgatgatcctctaaatactttttaacttgttccttcattgcgaatccatctttgtctgcgccaataatgacatccatgttcttattctcctttatttgttttatctgtgatgacatgtgtgaacgtgttgtaatgttgaagatcatcgcgactgatgcccggatcggtaatcaagccatctgtctgatcaagatcatagaagctatagaagtcttgccgattcaacttgaaatgatctgcgaccacaagtttcatgcccgcattgtctaaggcaatacgttgtgtctggccttcttcggggctagcattgctgatatgattgtccgcaataccgttgacactgataaatgctttcgtggtggtgagatgtgctagcatttcgtttgctaagctgccgataaatgcgccagatcgagcccgaagccgtccgccaattagttgcagtgaaaagaaatccgcgcgatcttgaaaactttgaaaaacagggagactattggtgatgatgcgcacatcgggttttttgagatattgtgcaatcatttcgttcgtggtcccagggccgatatagatcgtgtcacctggtatgatcagtgcggcaattgttgcggcgatttttcgcttttcattcacatgaattgatcgcttttcatttcgggataattcagtcagcggtttaaagttggtactttgggcgccgccatgaatgcggactaactctttttggtcggcaagctcttccaaatcccgtcgcaccgtcatcgttgaaacaccaaggctttccccgatttcgttgacagttacaatacccttgcggtcaactaaattacgtattgtcagtaagcgctcgtcttttaacatatcctcacctcgcacgtgtgttcattgttgtttgattttgtttcttattacattgttcaagttaccaccgagttcaatattcgtcaagcctataaatacgatgtctattaagatttcatttgccttgatgataattgatagagatcacaagaaaacggtttacaatgaacaaacaaatataatgcgacatttaaccaaacagaaaacaacatacacacacagaaatctgttttcacgaacggtttcacaaaaatgcttatgctgggtgacctgtgtcggatggctttttagctggtatagatgagaaattcatggcataaattcaaaaaataagtttaaaaaaaccgccaatagttgcatgtgcgcacgcaccctttggcggtttttggttggaaattgtggataaacgtcattttaacgtagtatataataggaacaacacgtcaagctaaggttggcaaagtcagcaaatcacttgcctgttgtagcaccgcaacccgaggcattacttcattacttggcggcgtggtccaacctgcaagtgcaaaagcaaccttggcgtcggcagctgcctgtgcatcagtcggtgtatcaccaatgtagatcgttgatgctggctcactgcccaaacgttcacgtgcgagggtgatgggatcgccaaagggtttgttgcgtttggcctcgccagcaaccacgatcgcgtcgaagtaaggactaaaatgaaactttttgtcttcttcaatgaactgcgtcttgtcttttgacgtcactaggccaagcttgtaggtttgtttgagctgattgagcgcatgctgcataccgggaaaccaagcaatgtcggtgaggaattccttcgaatcttctcgccattgctcatggacttcaggaatttctgcggcactgaatccgagttccgcgaggctgtcaacgcccgcacgcccattggtccaggttaattcatgaatggggacctctcggccatggcggcgtaatgttttttgtaagccatacaaatacgcctctacattgtcgagcagcgtaccatcgatgtcgaagataaaagtgttcatgatattcctcccaataaagataattgtagcaagtaagcgataacaaggaaaggcgtaacgatgagattcttacacacagccgattggcatattggcaaaaaactaaatgattttgatttgcttgaggatcaacaagctgtgtttgagcagctggtggaaacggctgagcagcataaagttgatgccattgtcattgcgggggatctctatgaccgcgccttgccaagcgaagctgctgtttccgttctggataacatgttgattaagttgaatcgtgaccacggctatccgttgttggtcatttcaggcaaccatgactcggcggtacgcctgcgcacaggtcgagcatggtatgcagctactaaaatgtttgttaatacccaagtagccgaagcttttgcacccattgagttggatggcgtccaattctttttgctgccgtattttgaaccctttgctgttcgtgactattttcaagataagacaatcacgaatgtggctcaggcaattcgcccgattgtcgtgaaaatgaagactttatttaagccaaatatgcgtcatattctggttagtcattttttcgctgctggaagtgaccatagtgcttcggaaacgaaagttaatgttggtggattggacgcggtaccgctggatgatttggcagcatttgattatgtggcactagggcatctgcacaaccatcatgctttgcatggtgaaccaaagattcaatatagcggtgctttgttaaaatacgcggtcagcgaggcccatcaagaaaaaggggtctatattgtcgatactgagaccatggatcgtgagtttgtgccgttgaagcctaagcacgatttaatcgagttaaaagctagttatgccgacttgacggctccagcatactatcagcagcaggatcgagacgcctatattgggattgatttgaccgatacgcaagtaattccgaatgtcatggcgcaattacgccagatttatccgcggattattagcctgcgccgtgagaacggcgtgaatgccgtcaagcctttgcaagagcggcagcgtgatttggatccgatgagtttgctgcagactttttttaaagatatgacacaagatgatttgtcggccgcccagattaagtgggcgaaggcagggttgacgacggctaaaaaggagcaggcataatgcaacttaaacaattacacatgcaattttttggtccgtatgcagatgcagtcgttgattttgacgattttcgcaccagtcccttattcttgatcagcgggccgaccggcagtggtaaaaccacgatttttgatgctttgatttatgccttgtatggtgaaacgtcaggtgagcgtgacggtgagcaaatgcgctcaaattttgcaggtaacagcgatttaacaaaggtgacactcacctttgatcatgatggcaaacattatttaatcgagcgccaaccgccgcaattgcaaagtaaaaaacgcggcgatggactaaccgaagtcaaagctaaggtgttgctagctatctcttcagatgaaaaacaggtggctgagtaccgtaagaaaaatcaagttcaggaacagctagacgccgttttacaccttgatgcttcgcagtttcgacagattgttttgttgccacaaggcgattttcgccggttcttagatgctgatagcaatgcgaaagaaaatctactgcgtgacttgttcggtactcagttgattcaacgttggcaaaccgctatgttggcgcagatgaaggccaagggagcagccattcaggaccaagagcggatgttagacgttttgatgtcgcagtttgacttcgagacggctcctgacgagcatgctacgatggcggataagctgtcattgatgagagcaacggtggcgagtcaagcgaaagttgtgacagcaagacaagcgaccgcggcgcaaagtcaccaacgatatcaggaagcacaaacggcactgcaacaggggcaacaattggcgcaggcttttacagagcgagaacaagccgccacagctttagcaaaactggaggagcaaaaacaaacccatcagaagcaattaaaacaaattgaacaattgacatgggtacagcaacatgaaaatgctgctcaacgtgttcaaaaggctggacaagatcttaaagcggcaattgtgcagtctgaacaaacgcaagcagctgtaacgacgaccgaacagaaattttctctggacaagcaagctttagcacgcttgcaggccaaatcagaccagattgaggcccaaaagaaacaactgaatagtttacaggctgttcagcaacagttgacagccatcgccgaacaaaataaacaggtgattaaacaagcagcgattgttaatgaggctgagcttgcgttggcgcacgcacaacagcagttgacagacgcccaaaccgttaaaacacagcagcaaacaagtctggataacttgcgcttggatgagctgataaccacggtcaatactcagcgcaacttattggctgccttagtgccacaggctgctaattatcaggaagcccaagctgatgttgcacagttgtctatggccatcaaaaaaaccaaagttacgctggaacaagccgaaacgcaggtagcagccacagcctcgcatttgaacaagcttcagcagactcagattcgccaacaaattgcacatttggctgctaagctcgagcctgacagtccatgtcctgtttgcggcagtactagccatccgcacccggcgcttgtggttgacgaaccattggtgagcgaagcagcgttgaaacaagccgatcaggaacggcaaaaggctgccgcaagaaaaactatggtcgagacacaattggcgaatcttgaaacccaactgaaaactgcgaaggccaaaaccgcacaggcaatgcaggcttttactgagcattggcaagaacaggccaaactgattgcaggcgttgcggataaaactggtattttacaacaattaacggcgttgaaaacactggcggcaactaacgagcaccagttaacggaagcgcaaacggagcacgctgctttgcaagttgcgctaaaaaagagtgacaaggccatcactaccggtacgacaaaagttcagcaatgcgaagctagtttgaacacggctagaattgatgcggctgaagcgcaaagtgcgttgaagaccatgcaaaagaacctgcccgcggaagcgacggatttggcgacggtcgctgctcaagctacaaccctgcagacaaccattacaacgtatcaggctcaacttcaggaggcgcaggcaagggtcaatgctttggatcggcaattagccgggttgcaagcagacgagaaacacgccgcggcacaagtgactgctttgaccaaggaacaggcggaagcaaaagcaacctttacgatagcagtcacgcagtattttggtgctgatggcaagcaacggttcgccgagttgcaactgcgggtatcacaattaccgctattgaacgaacaggttcagacttatgagcatacacagctcaagcaacaaacgttattagatgccgccaataaaactattggtacccaagcacagccacagcttgatcagcttgaggccgaagcaacagcagcggaaacgacagcaacaaacgaccaaacggctttgattaagattagtcagacgcatgatgctgctgaaaaattggccaaacaagcggccactatctttacggccaatcaaacggcgcttgcagcctatgcggatttacaaacactggccactgtgatgaatggcaatggtcccaagaaactcagtctggagcgatacgttttgcaggcttatttgcaagaaattctgaatgtggccaatagccgtctgcaggttttgtccaataaccggtatcaatttgttttgcataccagcttggggacgcagaagatccactctgggttggaaattgatgtttacgatgatcaggttggtgagaaacgagctgtgcagacgctatcaggcggtgaaagcttcatcgctgcccttagcttggcgctggctttaggtgaagtgattcagcaggaaagcggcgggattaatattgatgcattgtttgttgatgaaggcttcggcagccttgatgccaatagtcttgatgtggcgatgaatgcgttagaatcattagaaggcgaatcgcggctaattggcatcatttcacatgtgaccgagctgcgggataatattcccgatcagttgcaagttgagccagcaggtacgggccgcagtcgcttaaagatccttcactcggcttagcacttttaaattgagtgtgccaagtctacgtgaaagtggtataacagagattgtaagggtcaatcctacgaactcacaccaaaaagaggcgacatcacatggcatcattgagcaaagaacagaaaaaagctttgatcgctaaagttgaaaaggagcgccaagaccatcccgaaaagaagtcaaagaagtctggcttcgaaacgattgacgaagaagcagaacgccttgaaagcgaaaattaatgttagttgagtcgctggtcctgaacagttaactgttcagggcttttttttgcagagcgcaaaccggcccgcttagaaaccaaaacataagtggccccgaacctaaacgacagggctttggtcgtttaggttcggggtccttatgcgtaggtttctgggccggtttgcgcgtttcggagttcagcaatatcaggcagggctttggtcgtttaggttcgaagtccttatgcgtaggtttctggatcggtttgcgcgttttcaaagacctatagcccaatattcattttagagacagccggatctgcaacttttgcgccccagtgacagtaactgtctatgatggcaagaacggtatttatcgccattaagctagcgcttttacccatgacgccgcatactagtcgtgtccattgagcagttgccgcaatactaagacttttttaataatggtctacaaagaaattaaaagctataacgcatgtgagagtatgcaaagaagccgattaatcagcttttttcaaaaaatattagcacttagcgttcacaagtgctagtttgtggtataactataggtggagcgagggagaaggaacaagagcttcagagcaaatgtgtttctcccgaatcgccaaagtctctatattgaaaggaagctatctgttatggctaatgaagttttgaatcgtcgtaataatgagttgatgaacaatgtgaatgatccgttctttgacaacttagcacgccggttcttcggcccggtatctgactggatggattgggcaacacctgccatcaccagcacggccatcaacggattactaactgatgttaaggagaccaaggacgcttacgaagttcatgtggatgtacctgggattgataagaacaacatcaagatgaactaccacgatggtgttttgagtattaacgttcataaggacgatatcaccgaccacgctgataagaacggcaacgtcatgatgtctgaacgtaactacggcacaatgagtcggagctatcaactaccaaacgttgatgcaagcaacatcaaggcagcctatcaggatggtgtcctcaatatcaccatgcctaagctgactgaatctaaggagtctggtcacaacattgaaattcaataatgttcgtcatcagctgacccaagatttacggactgcattgcaagcatgaatagaagcggcacttctgccgttagtgggcagaacccatgagtaagcaaacaaaaatcgatgagaattgccgcagttgcagtgatcattgagtcgttaaagtcatcccagcgatacgtatggtcgttggggtgatttttttgtagagcgcgaaaaggcgcgattagaaaccggaacataagtggcctcgaacctaaacgacagggctttggtcgtttaggttcgaggtccttatgcacaggcttctcgaccttgctcgcgcgtttcagcttgcaacaaggattcccactcaccaactaaagcagttcaatatttcccgtttttcaagtccatggtaagctagtggttatgatgacaaacaaattaatgaactggccgccggaaaaagtggcggcttttcaaaaggccttattgaattggtatgatcaacatgcgcgtcaattgccgtggcgcgaggatcatgatccttatcatgtcatggttagtgagctcatgctgcagcaaacgcaagtgcagacggtgattccttattatgaacggtttatgaatcaattcccgaccgtgggagccttagcgaaggcgccagaagcagaggttctgaaggcgtgggagggcttgggttattattcccgcgcacgccgtctgcaacaggcagccaagcagattgttgccgattatggcggcgtttggccgcagacctcagaaacactgcagacattgtctggcatcgggccttacacagccggagcgattgcgtcaattagtttcggggaacctgtacctgccattgacggtaacgcttttcgagttttcgctcggttgtttaaagtggatgcggatattgcccggccacaaacgcgtcagctcttttttgacttgattcagccactgatgccaaaagatcgacctggtgattttaatcaggccgtcatggatcttggctcaagttacatgtcggcgaatcacccagaccctgcacattctccggtgcgagattttgatgccagttatcgaaatggggtggtttcggcttatccggttaaaacgaaaaagccacgaccggtgttgcatcgttactttgcgttagtcatttgctcggagaaaggctatttacttgaacagcggccaagtactggcttgctggctgatttgtggatgtttccgctcgttgacatggcagatcttgaaagtaccatgatgagtgcgcagttagatgaggtcagcacgttgtttgcggcatcgtcagggatgcagctgacgtttgcggatcttggcgcgaaaacggttaagcatacttttacgcatcagcaatggcaattgacgttgattggggtcgagactgcggcgagcgatctcagctttttaccagcacggtgggtgaaagcggatcattttagtgagctggcgttgccgacggtgcagaagaagttgaatgcagcgctggggatgaattagaaattggtattgagtgagtggcttagtgattttgaaacatgttcatcagctcagaaactgggccgtctcacccgctggctgaaacgtgcgaacaggcgcagctcggctatgccgagctaaccactccgcttcacgccctgagtcaattgcttacatttcgccgttgagcgggttatactgagtgcaaatttgattggagaggtgagcgttttgacagttaatgtaacaagagatatcgcttacggtgacgcagcattacagaagcttgatttttatgaaccagagaagtcaaatggggcggcgatcctcgacattcacggtggcggttggtttcgcggtgagaagaataaagaaggcgagatggctgaacggtttgccgcacttggttatacggtggcggttccaaattaccggcttgcacctgaagccttcttcccagcagctcgtgatgacgttttagcagccttttcatggttgcgggagcatactaaagggttgcaacttggcgtttttgggtccagtgcaggtggttcgctgtcagttgacgttgggttagccgaaggggtaccgacagtttcttggtcgggcatcttcgacattcgtcagtggttcgcagatcatccagcagtcgttgcccagccggatacgaaaaccgattttgtgaaaacggcaagtgcgaaaattgaccaaggtggtcgtaatgatccattttacaaatggttcattttgaattatgttgattcagatgaaacaaagttccctgaagttgaaccgtttgaccgtttgaccgctcaggctggacctttgtatctggctaattcgcaggaagagattattccgattagcggcatctatcaattggcacatgccgctgaaaagcttggcttacctgtaaccttgcagtcgattccgggcggtcagcatgctgaaggctatcttgatgaagcgtggcagggtaccgttgcgttctttgcgcagtatttgttgaaaggataatcgtggaaacattagtcgttgtgagtcatcctgaaattgaaaaaagcgacactcagcagtttctaaaggcgagtgccgcttctttgtcacaagtcgtgtggcatcatttagatagtcggctaccctttgatgtgacggcggagcagcaagcaatcacgtctgctgatcgccttatttttcagtttccgctttattggtatatggcgccggcaagcttacatcagtggctgacagatgtttggctgaaacagtttgtttatgatgcgcgaggtggattgctacacggcaaatcacttggttttgtcgtgacattcagtcaaccggcgaccgcctatcagcttggcggtagcgttggttttagcatcagccaatttttgacaccatacgcggccttggcggctaaaaccggcttgacgttattgccgcctttgacaattgcccaatttgccaatcaaacagatcttgagcatcaacaattattggtgcgttatcagcaatatttgacgcttgaccatcctgaccgaccagatgaacaagcacagtggtttattgatcgattgagtggcaacgctgatacacaattgttggcggatcaattagcagcgcagacggatgacattgatcgcttacgtttgacattacacgaattaaaggcaggcgagtcggaatgacaacagatgaacaatggctagtgaacgctgctgcagtgcaggaaaaacaggcaacatcttatgaaaatgccgccttttttaaggcactacaggcattcgtcacccagcaggcaaaacgccgtgaaagtcttgaaggtgaaatcgatggccgcagttggaatcacgaacaatggtgaaagttcagtctgacgacggaggggaaataactcaccgtatgctatggttaagttagcaaaacaaaggagcctaaaaaatgcaaacaatgtttgatcgtcttcaacgttggtcatggctgcgcggtttgctgatgattttaatcggtgcctggattttaatcgcaccgcgccaagtctatcgcagttttctctggatcgtagctgcagtcttgattattgcggcaattccaaagctgattgacggcttttcagcccgcaaagcatcaggcacttacggtacatctctttttacagggggcttttacctgttattggcgctgatggtgccggtcatcgttcggccactgatgagtctcgggccattgctgctgggcattgtcttgatgatttatggcgtcaataaaattttaagtgctcgaaatcgacaacaatttgtgaacgtctcggtttggccgaccgtcatttatggtgtggtgttgctcatcatgggcttcattatggccttgaatccgttcagaactgtcatgatggtcttctcattctttggtggcttactcgttgtcatgggcattttgcaactctttacgcgaccacgtgcctaatcactaaaaaagcattcgacatctaaaaggtggggaatgctttttttctttgcctagatcttttgctggctgataggcagaataattgtattccaccgagtagatggctacactctgtgcaaaaggatctgacaacgcttaacatgcgtgcttagaaactggcctatacgcgatttaaggctgaagtcgtcgcctttctgggctggagaacacgttgaaggaggaaaaaatgatgcacaagtttgattggcgggaagttgaacgtgacgagtattcgcggtctgaggaacctagttttgtgaagttgacaacgcgcagctatatcacagcgatgggggtggcaccagatcgggtgacggatcaagccttcacgtcattggcagcagcggtcacccaaattgctgagcggatcagcgaaggaccagatgctggcattgatattccgaactttaaagcttaccatccctatccattgcaggcggtttggtcagggggcgataaaatcagtaagcgccacatttttcgactgtggttgaagcaaccgttgtttattcatgaagaccagtttgaggctgcactgacacagctgcattttgaaccagccattgcccagcagcttcacttagaacagttggcagaagggtttgaaattcaaagctttaattcaacaccactgacggatgaagcacctgcgattgcgcgtattcaaacagtgatcaatcgcgaccatctcgttccgaaatttgatgatcggcatcgcgaggtttatttggaaggctatcaaggagaagtaccggtactttaccgggtgccgcttgacgaaaacttcggtgaagttggcgatgagcaggttgcatataattaatctgaatcgatggcgccatgaaaaagcgatcagctctttttaaaatgagctgatcgcttttgttgtcttaattagaattgtgggtagacaatcttattggcccagtgattgatcgggccgtactgatgaccgactgcaattggatgaccaatggcttgattggtgaaacgcttagcaatgcgaatggcttcctcaactgagttgcctttgccaatttctgcggtgatgacggcggaaagcgtgtcacctgtaccgttaacccggtcggttgcatgataaggttcgcttaaccagaatgacttgccgctttccagcaaaacaaaatcacgcacagttggttgcgtaggatcatcatgggcaccttttaaaacaatgttcttggcaccggagtcttgtagttgatgtgcggccgcttcagtctgagcgtcggtgtcgagtttcataccggtcagatgctcggcctcgtaatgattgggggtgaccaccgttgctagggggatcagttcatttttgacagcatcataagcgtcttgttctagcaacatcgcgccgtgtttagtgataataacgggatcgacaactaaggcaccgaaatcatattgctgccagtttttgataatattttgcaccagtgcgcgatcggcaagcatgcccgttttagcagcgcgaatatgcaaatcagcagcgagtgacttgaactgggcatcaatgaacggtaatggcatgaccatactatcctgaatcccgtaagaattgcctgcaacagccgcggttaaaatagtagcaccataaacgccgcgcatgaagaaactatgcaaatcggcttggacaccggcactgccgtcactgtccgtaccgccgattgtcatcacttgtggaaactcattagccacgtgattccctcctcgtaaacgtgttcgctggtgcagaagccggcacatcaggatctgaagcacactggccaaagctcagtcaatgcgcttgaggtcgcttatgctccggattctaaccgcatcagtttacgctcttcctgataaaagactgtcatgactcgccaatactgttactaattaaacgcccgtttttgcggcaagacagctttaagccattcgccgataaatggatactgatggttaagttcgatgatctgcgtttctggatcaggatacttcagataaaccatattattagccggattgatcatcactgtaaagatcttttgatttggtagtggcaactcgtaaacgccagctttggcaccttgtcgcatgaggatagcgttgttggatgcaatgacgaataattcatccaatgctggtgaattactgcctgccgaaacacgaataatgagcttgagacggtgattgaccaattcttgcggcacagtggttgatgcccactcaaagcggtcatttttgacttcttcagagccaagatcttgccagtcgtggccatcttcgtctaggacttgatacccaagtacttttgcatcctgatctaatgacgtaccaatgctaaagtcgccggctttgatgactgccttttttgcaacgagtggtttgaggttatcaaaccgtgtcttgaaacttagtccgttaacgggttgcaagacagtttcatcaacagtggtgaagcgatagccgccttgattgagcgccttggctaaggcagacagtgccttaacggtttcggcatcgtaggtcatggcattgctgtcagcagcggtgatctgcaaaagtgtcggtaggttgaccgcttttaatttggcatcgtcactcaagggatccacaatcgttaacaatgtgttgttgtcgtcctgcgtcgtctgaatcaccgcaatttcgctgtggtgagcatctgccgttgtatcctgcagccacaatgtctgcaaaaatggggtagggattgacgtcaagttttgcaatgcctgatataatttattgcccaagagattcgtgtagcttgccaataaggcggtcaatgcctcatcatttgattcccacaatggcgagtttgctaaacgatcggcttcttgctgatatgctgtgccaatttgttggcgtgcctgagcaacggtgagtggttttgtaatcagggcagccaaatgtgcatcattaagattaagcatgcgtgcgccctccttcaagctttaatgactgcatgaaatcatccttcaagttagctaagatattttcaaattcagcgactgagctgtaagtccccatcactgcttggaattcatagcgcgtgatggctgcggaaacttcgagttcgcgtttgcgcttgtcgaaaatatcatcggcggtaagcttttccttgtcgaactgtgctttcagtcgcgaggcatctcctgaaggttgtgaaggcgatgcttggtcatcatcactcggatcaataaagtttttcaacaagccgcggaaaccgctgttgccttgggttgcttggccgcgctctggggcgttttcggcttccaagttgtcgatttgggtgtgcaatgaatcgacgtcacggtaaacctctttgcgcatcgcatccaactggcggtctagataatggtcgggatcgtcagaaaaagcttcgagttgtggtaggattcggcgctgttcgtcagctgactgcgtgattgctcgcaagatgacgttaatatggccaaactcgcgtcggtggtaccaattaccaaagtagacggttccttgatcattaacttcaaaaaaggggatgtgctggcgcagaaaatcaataagaccgatctgcagaaaatcatgcagttccgcctgtgcgtttttgtcataagccaaaatataaccaggcgtttcttcgatgtctagccgcagattttcagcggttgcatccagtccctgataaaggcgataacgtgactttttatgccaagcatcggtaaaatcgttgaagaatttcttttgataagtaaggctagcttcaattgacatttaatatcctctcacattctatactaatgatttaagtgtaccgcataactggcaatataaggaagttttcttgtctttttcaagcccagaaggcagattcagccgtaaatgctggatacatgctagaatatggacgagaggtcgttgcttcctataaaacacgctcgtcaatccagcaagttgcatgtaggcggattgacctgcgctcaatatgaaatgaggtaggcaaaatgaaaattgctgttttgggtgctactggtcgcgcgggcagtgccattgtcgctgaagctcggcgacgcggacatgaggtgctggcagttgtgcgtgatccgcagaaggccgctgatcggcttggtgcaacggttgccacgttggtgaaggaaccgttggtattgactgaagccgacttggaaagcgttgatgcagtggtagatgctttgagtgtgccgtggggttcgggccgtggttatttacatctggactttgccacgcacttagttagtctcttgcgcaacagcgatacactggctgtctttattttgggaagtgctagcttggcgatgccgggtgcggatcaccccatgattcttccccaattttaaagtcaagtgcaacgatgataacgaatccttgatagtggtctagtctgttacgccatgcatcggtagtaatcgcatgggcgaagatagttcagaatacgtcttggacgatggttcagtgcggattggactgcttgaatttcaaccagggtaactgctctgagagacttccctttcgggaagaattccctaagcagtccattggcgttctcgtttgtgccacgctcccaaggcgagtacggatgtgcgaagtaaatctgggttccaacaatctctgataacttggcaaactcggaaccattgtcaaaagtgatactctcaaattccttggccccgtagtcgtcgatcgtgtcctgcaaggctttaaggcaggtgcccgcatgatagtcaggaatcttgacgatgatctcagtccggctgtaccgttctgtgagcgtcattaatgctggctcatcagctaagcgaatacctttgaccaagtcgccttcccaatgtcccacgcctgtgcggtcattcacggccgcaggacgcaactcgattgagtcgccgtatatcttcttattcttgcgcttgtgggcgttcttatagcctttgatgcggcgtcggagcttcttgggaagtgtcatgttgtctagctcaagcagcccggcgtcgatgtagcgatacacagttgtcgttgaagggcaagccttgccctggtcgcgatagaagtgtacgaagctatcaacgctgtgtacgcgcggcttacgagtaagctccctggcgagagccttgaagaacgcacggccggtcttaagaaaggcgtagtgaccggttctatcgcgtttacggtcgtgcatggcttgggcagtttccgcaagatagacttgatgcgagtgacgcttcgagtcgagctgagttacagatccacgcgtgatttctcgtgagattgtcgctttactgcgatgaagcttctgtgcaatcacggtcgcggtgtcaccagcagcccgaagggcctgaattgtagcacggtcgctaaaactgagttgttggtaatgcttgtgggtgttagtctgagagtgggtcatgaagattcctgctttcttgtttagctagcactaacaagaataggtcttcatggcctttttggtctagtcgtcagggtgttgcacttgaattgtaaactggggaccccatgattcttgactttccagaaagtgccgcaagtcaaccatggtatgatggcgccctttaccaatattacgaatatcagtttttacaaatgaacgcgaatgtgaactggattggcatttcaccaagcgaagcctttccaagtggaccagcaacgagttatgttgccggcaaggatacattgctggtgggcgaagatggacaaagccacattacgaccggcaacatggccttggcaattctggatcagttggaacatccaacagcaattcgagatcgaatcgttgtccgcgatgcggattagatgcttgtgcagcgattaaaaaaggcaactttgcaacttcccgaggcgatgttaggaaggtcaaagttgccttttgccatttttgcttggtggactattaaagacggtaagcgagcctgctttcgctgaaacgggtaaattagcccagaaatctgcacataaggacattgaacctaaacaaccaaaactccgccaattttgcaggtcctcgcaaacgcgttcgcagtcgcagaaacctgctttcgcgctacacaaaaaaaacccgcgtattgggggtacgcggggtttcctgtcaacaccattgggggtggtgccgacttctttttactttggaggagtaaaaatgaaaaaaagttgggttggggtagtagtaagaagggggtaaacttccttgctacatagaaaagaataatctgtaattgtgaattttttatgacgttctggaagaaaaattttgaatgtggttttttaatgttctttgctactttttgatattgtgagcaaatgttattgaattttaaatggtcaaaatgtcaattagttgaaaatatgtttatataaattgacaaaagctgttgtgattgaagccttgatttctcgggcgaaacttaaatgaatgaattgcgaccgttttaagcgttaatatcgttatcttaaggtataataagtgttccaaaaaaacatggcaaaaattttgccggaaaagaggtaattttgatgggggtggtagtatctaactttcatctggcgaagatcacagctgaagaaaaagtgaaactaacttctggaaaagatttctggacctctgagcatcttgccgataaaggtataccaagttttcggatgagtgatggtccccatgggctgcggtatcaggcactggcagcggatcatctcggaatcaatgatagtgttcctagtaccagttttccaacagctagtgctagcgcagctgcgtgggatcctgatctcattcaagcaatgggtaaggcgattggattagaagcgcaaagtttaggcgtcgatatggtacttggtcccggcgttaatatgaaacgcaatccactttgcggtcggaactttgagtattttagtgaagatccattcttggccggaaaacttggcgctgcgtggattaatggtatccagtcgcaaggaattgctgcatgtctcaaacattttgcagcgaataatcaggaaaatgaccggctttcatctgattcgctggtggatccgaccgccttgcatgaaatctatcttgaggcttttcgtattgctgtcacagaaagccacccagaagcggtcatgtgttcctacaacaaaattaatggcacctatgcaagtgataatctgtatttgatgacccaagtgttgcggcaacaatttgggtttggcggggcagtgatcacggattggggagcgttgaatgataaggttgcggcgcttaatgccggtacggatttagaaatgccaggcgacgatcatttatttgatggtgaggcgctgcaggcttatcaacaaggcacactgaaattggccagcttagatcgaacggtgactaagattgccgaaattgcccgcaaacaacggcccaaatttcagggatcgcgagagcaattactgcaagcaaatggacaattggcgcaaaaaattgcggaaagtgcgattgttctgctgaaaaatgaggccgccttgttaccattacaggctactgatacagtcgcggtcattggtgagctggctaaagctacacgcttccaaggggcagggtcttcgcatattaatgcttccgagatcgtttcagttttggatggccttaagcaaaaaaaggtgtcatttgattatgcggctggctatcgacttgacgatcaggatgattcgcaggcgactgccgaggcattagccttggcacgcaaccatgacaaagtcgtttttgttgctgggctacccgacaattatgagtcggagggctttgatcgccaaaatatggctttaccaaaagttcaaaacgatttattgcaggcagtgaccgcagttaatccaaacgtgattgtcctgttagttgccggtgcaccggttgagcttccgtgggtggatcaagtcaaagctgtcgttaacctgtcacttggcggtgaacgtatcggggccgcagctgccaacgttttgacaggtgctgtcaatccaagcggcaagctagctgaaagttatccgctaaaataccaagacgtgccctcagcggatgtctatgataaaaaccctcggtcggtgccgtatgttgaaagcacatatgttggctaccgttattacgacaaagcaaaagtgccagtcgcctttccatttggttttggtttgagctacacatcgtttgccttgaaaaacattcagctctcaagtgatcacgtaaccgatgatcagccactgaccattagcctgcaagtgaccaacactggaaaggttgatggtgcggaagtggtccaggtctatgttcaagaacaacaaccacgaccattacgaccggaaaaatcattaaaggcattcaaaaaggtttttgtcaaagctggacaaaccgttaatgttgctctcgagctgaaggcacaagcctttaaggagtggcgtgaacagacacaaacatgggtcttgcctgaagctcaaaaggcgattgctgttggtaccagtgtcactaatattgatgctgtcttaccagttagcttcacaggggaaacttttaataactttgcaacgattccaaattggtatacaacgctttccgggaaacctagtgttcaagattttgaacagttgacagaccagaaagtaccggcaccacatgaatttgtaccaggcgaattcactcgactcaatacaccgcgagaaatgaagaaacactcattgttgctgcggatagtggcgtggatcacggtcaaaattcgaactaaagattatatcgacaagcaaggacccgaggcgaagttccagcaggcaatcgtattggacacgccactcattcgcttggcgcaacaggccagcggtgcattaaagttaagcatggttgatcgactcgtagctgcggccaatcatcagtatgtgaaaatgatttttagataacagatgtattgtaaaatcattaaaaatttttcttgacgaatgacgattggattcggtatgctgattctcgtaccaaacagatagcgtgtcagcatacgtgatttctgcgactgcgaacgcgtgtttaaaggagtgttgaccatgaacttagtacggcaaacacaacttaataactttttcggcggctttttcggatagcggtttgcagtgagatgcaaaccgcgcaagcagtggtttgcatccataaggccgtcacattaaatgtgcacacaacgccgcatggatgaacaattatccatgcggcttttctataccgaaaaatctcggggccagtcgcatggtgaaaaccagcggctggtcttttttgcatcatacgactatgttgaccgttccggatggctgaattgtcactcgtcacttatcgataacgcgctcgccagcgcagcaaccgcgctggctcgcgctcacaggaggaatttttatgaaaaagcatcgactacttgttattgccactgcagcactggttggcttaacgttgatcggctgcggcaagaaaagtaacgccgccagttccaaaaccgttaagatcggtattttgcagttgattgatcaaagtgccttgactgaggctaggaaaggctttgtggccgagttggccaaagccgggtacagtggtgatcgcgtcaaaattgattacgtcaatgcccaaggcgaccaagctaatctgaaaacgatgagtgatcgtttggcaagtgataagaatgatgtgaatcttgcgattgcgacccctgcagcacaagcactccaacaagctgacaaaaagacaccgatgttattcaccgccatcacggatcctaagtcagccggattggtcaccaatcccgcaaaaccagataaaaatgcaaccggcgtgacagatttagttgcggtagccaaacaaattgacctgcttcatcaaactttcccagaagcaaaaactgtcggcctcatgtataacgctggcgaaccaaattcggtttatcagatcaaacaagccaaagctcggctgaaacaactcggtttgcgttaccaagttcgtacagcggcgacaactaacgatgtgcaacaggccgccgagagtttagccaaaagcgtcaatgccctttatttaccggccgataacgttatggctgccgctatgccgaccattggcaaagttgccaaggctcagcaaataccagtcgtcccagccgcttcgaccatggttcaagacggcggcacgatcaccaaaggcatcaactaccgcgaccttggtaagcagacggccaaaatggctattaaactgcttaaaggtaaaacagttaaaacattacctgttgagaaaccggcaaaagtcgaaacggttcgcaatgaagccatgttaaaagccgtcaaacaaacggttaaattaccagaataactgctatagtaacgttctttgacattcttccccatacaaaaactgaaatagccgaatgtaagttttttgtttgtgttgacaagatgagaatatgagtatacgctttgagacaagtcagagagaacatctctgcatgaaggagtgttgatcatggatcgagtcaaaacaacacaacttaatcattcttattattacggctatttcggataatggtttgtatctcatggatacaagccaatcaggtttgtatccatgatggccgtaagtgtttaacttgcaattaagcgccacatggacgaattcatccatgtggccttttctttttccgggaaaaaacaatggccagccacatggacgaaaaatccagtggctggctatttttgtaagagcgcgagtcagctcgggtagaaaccggagtgtaagcggccttggtcgtgatagtcgtattttgaccactgcgaccaaggtccttacatgtaggtttctgcgccagtgagcgcgtttgcacaaagtgtgaagcaccatcaccttaacccgtacatcccaggaggaagaaaaatgaagatcaaacgaatggccgctattgcggcagcagcactcactatcatggttttagccggttgtggaaaatcaaccagtgcagcggctgacaagagtcaggttaaaatcggcattttacagttgattgaccagcaagcgttgaccgcggcccgcaaaggcttcactgaagaactggccaaagccggttacaaaggcaagaagatcaagttggactacgtgaatgcccaaggcgatcaatctaatcttcagacgatgagccagcgcttgcaacgtgataaaaacgatctcaacttggcgatcgctacaccggctgcccaagccctgcagaaggcagacagcaagaccccattgttgttcacggcgatcacggatccaaaagcggctggtcttgtgaccacaacagccaagccggacaaaaacgctacaggcgttacggacatggtagatgtcgctggtcagatcaactttttacacaaagcctttcctaaggccaaaaaagttggcttattattcaacgccgccgaagaaaactctcaagttcagatcaagcttgcgaaggcagcaatcaagaaactggggttaaccgccgttgaaaaaaccgccgcgaccaccaacgatgttgaacaaagtgccactgcactgatgaaacaaagtgatgttgtgtacattccaaccgataacacgatggcggcctcaatgccgaccattggcaaaatcagcacgaaagaaaacattccggtcgtcactgctgatgcgacgatggtgaaattagccggggtggcgacagtagggattaattacgaagatctaggccggcagactggcaaactggctgttcaaattttgaaggggaagaaagtcagcgatctgcctgttgaaaaaccggctaaaactcgattggtcactgatccgacccggatgaaacaatttggtttgacagaggctgccttgaagcaagctgaataatcgatttcgtgtcataacgcgctggcagtcgcagcacccgggctgactcgcgcttctaccataacgcgctcaccagcccagaagcctgcgtgtaaggacctcggtcgcaatggtcaaagagcgaccatcacgcccaaggccgcttacactccgctttctacccgggctggctcgcgctcacttaacaaaggagcttttcattatggacatcgtgacatcaagtattgcccaaggattactatggtcggtcatggcgattggcgtgtacctgacttttcgaatattagacattgctgacatgacggctgaaggcagttttcccttgggcgctgcgattactgctcatgcaattgtcacgggggtggggccgattgcggcgacgctcatgggttttgccggaggcgctgcagctggtgcagtttcaggctttttaaccaccaagttgcatattccagacttgctcactggtattttgaccatgaccgggttgtattcggtgaacctcttcatcatgggcaaggctaatatcagtttgattgggactgttaagacggttttcaatctggttgacagtggtgatgccacgaccactggcatcatcatcggtgccattgtggtcgccatcgtgattggtattctggttttctttttccataccgagatgggcttagctgctgcggcagtcggcaacaaccagaacatggcggcggccaacgggatcaacaatgatgcgatgaaaattatcatctacatgctgagcaatggccttattgctttatcaggcagtctcatggcgcaaaccaatggctatgcggatttgtcgatggggattgggaccatcgtcattgctttggcagccatcattatttcggaaatcctattgcgcggcgtgccgttatgggcgcggttgttgatgatcattgtcggcgctgtgatctaccgcctgattattgcggttgtgctggatcttggtgtcgacccgaactacctgcgtttcttctacgccttgatgttaacgatcttcctgtcattgccgttactgaaaaagaaattgcaactcatgacaattcgtcacggtaatcggcgtcaagctcgcatcgttcaggcacagatgcaagcagcaaaaaccgattcgatgagcacacatgctggtgatcagcaaaaggaggtttagccatggccgtacttgaagtgcatggactgcatcagtattttgaacaaggaaccgtgaacgagaatcacgcgctgaaaggcattgatctcagtcttgaacgcggggagttcgtcgcgattattggtggcaacggcgcaggtaaatcaacgttgctgaacagtatcgctggtacgctcccggttagtcaggggcagattttgattaacggtaaggacgtgacctatcaaaatgttgctaagcgggcgaaggtaattgctcgagtctttcaggatccgcgttccggcaccgcctcgttgctgacaatcgaacagaatttggcattggccgaaaaacgcggctcttggcgtaacttttgggccagtggggtcaaacggagtgatcgccaacattttaaggaaaaattggcgacccttggattgggccttgagaatcgcctgggtgccgaaatgggcttgctttctggcggtcaacgacaggcagtaaccttgctgatggctactttaaaagaaccggcgttgttattgcttgacgaacacacagcagcgctcgatccgcagacaagcgctaccgtcatggctttgactgataaaatggttcgcgcgcaacatacgacaactttgatgatcacacacaacatggccagtgcactgaaatatggtgatcgcctaatcatgctggatcatggtgaaattgctgttgatgtccgtggcgaggaaaaacagcacctgaccgtcgaagacttattgacgatgtttaaagaacgcagtggacaagagtttgccgatgatgctgttttgttgagttaaagctggcctaaaagaagttaatgaatagatcctctatgagaaaacaaaagacgactgatttccgccattggaaaatcagtcgtcttttggtggctatcagttgtctttcaaccgtgtttggttgaagcgcaactttgatggttaaaaaatcaagcatgtccgaaattagtggttaattcataactgctgccagcaaatacagatactcagcagctggcacttttccattagcccatgtccacaatcgtccgggttgtgtggtggttaaagtgtttcgtcaaggtttgtggcaagtcagctagtttgaccgtatcgacaggcattggcgccaatttgtccaatgtctcccatgcggctgctcgggccgcagcaggggcattgacggaatccacaccgagcaagctgacattgcgcaaaatgaaggggaagacggtcagcggcaaggcagttcctgcagcattgccacataacgcgattgcgccgccataacgcatacttggcagcaaactggttgtgaacgatccaccgagcggatcaatggcaaagtcaaagcgttgcttactcaaagcctttcccttgggcagctcgtcaagtgctaatgttgccgtggcgccaagtgacatcacctgtttttgctgatctggtgtccgcacaataccgattcgattcgtgaagcctgcttgctctaataagcgcatggcaacactgccgacaccgcccgttacgccaccaacaagaatctgcggtgcatgctcaggcgtcatgccgtgcgcggtcaaagcagcgacacataaggcagcggtcaaacccgccgtgccaaaactcatggcgctagcaagtgtcatggctgatggcagcgtgattgcccaagaagccggaatgcgggcatattcagcgtaaccaccgccttgactgacccctagaccatgaccggtggccaacacttgatcgcctactttaaaattggcatcttgactggctaccacagtcccacttaaatcaatcccgagaatctgtggataatctcgaataatttgattctgcggttgataggcaagcgcatctttgtagttaatatctgaataagcgaccttgatcaataaatcgcctgctggtaagtcatcttcgtgcagggtttgaaaagttgccttttgcccatcgtgaaccaatgcttgaaatgtttgcatagaacaagcctccttggatggtattcttccacctattgatggtgttgaattgccatgctcattagttaactaaagcatatcagataacgatgatatcgcaaaaccaacgttattctgccgaatctgataaggtggcctgacgccatggcgctaattcgtgccgatgttgacggcgcttgtaagtttcaacaaccaacattggcagccagatggcaccgaggacgatggaccattgtccggctgttagtggcgctagctgaaaaatttgttgcaatggcgcaatggttgctaaggcaacgatgactgtcatcgtcagtaaaaggctaccagtcaggatcggattgacagtcatcgctgaccagttaagccgaccacgggttttgatgggaaaaatgtccagcatcgaaccgatggctaatgtcagaaatagcatggtcatgccgatacctggcacatcggggctgaccacgaaacggccaacgaagtagatgccaagaatcaagccaacataggtggtcgtccgcacggccacacgtttgccgaggccattgctgaaaatactggctgcttttggaatgggtttcaagtgcatcatgccaggttcagccaactctcggctaaggaagaagccgggaataccatcagcaaggacgttgacgatgagtagctgctcaggtgtcatcacagcaccccagccaacgaggacggccagtagcatcgtgaaaatttgggcaaaattaaccgaaatcagaaattcaacggcttttaaaatattttgatagacggttcgaccttgtgcgacagcatcgataatcgtagcaaagttatcgtcggtcaaaaccatatcggcagcatttttggccacatctgtcccagtgatgcccatggcaatgccgacgtcggcagctttgagcgctggcgcatcattgacgccatcaccggtcatggcgaccaccgcatcttgtttttgccaagctttgacgattcgaattttatcactcggggtagtccgcgcgaacacgcggatatcagcaatattggccgccagatcctcgtcgctcatttggctgaggtcatggccggtgatcgcttgttggccgctttcaaggatgccaatgtctttagcaatggctttggccgtaccgagatgatccccagtgatcataaccgttgtaatgccggcctgtttagcagcgcgaatggcagcgggcacttcagggcgcggcggatcaatgataccaatcaatcccaacggttgtacggcggttagctgtgtttcccagttttccccaggatcggtttcaaattgttgatagccagccgccagtacccgcaatgcttgtgccgtcatttggtcatggattgcggtggcagtttgctcccagttttcaggcgcaaagttaattcggtcaattgctcctttaataatcgctagatagtggccatccggcgtgcgatgcaaagtcgccatggttttcttgtcagatgaaaacggcgcttcagccacacgcggataggtttgctcagcctcggtccgactcagatcgtaatgatcaagtagccgaacaattgccagttcagtcgcatcgccgatatctggttcatcatcagcagttaagtgtgcgttggttgcaagaccgagatacttgaaaaagcgggtgtcattggctgacaactttgtgttggcgactttatgaatttctttgccataaggccagaaatgggtaactgtcatgcgattctgcgtgagggtcccagttttgtctgaggcaatcacgttcacgttcccaatggtttcaacagcggtgacttggcgaataatcgcgtggcgcttggccatcttctgaacgccatgagccaaactgagggtgacgatgacgggcaaggtttctggaactgcagcaatggcgaggctgacaccaagcatcaagctatctgtaaagccctcctgatgaagcaaggttgctagcaaaatggtgatgataccgcccaagatagcaacgaaggatagccgcttgccaagggtgtttaaccgtttggccagtggcgtcgtctgcttttttgtctgattgagcagtgcagcaatttttcccagttcggtgtccatgccggtagccgtcacaatcgcagttgccttgccgctggtaatggctgtgccagagaaaatataattggcagcatccccaagatcatcaggagcagtggccaaggcttctgacgttttggtcacgcccagactttcgccagttaaaattgcttcatccgcttcaagttcttggctttgaatgattctggcgtctgcaggaaccgcatcgccggccttgaggagaatcaaatcgcctggaacaagctcggcggcctgaatggtttgcgtcttgccttcacgaacaacggtgacggtttgaatcgtcatggctttcaaggcagcgagtgctttttcagcgctgtgttcttggtacaaagcgatcacaacattgagaatgacgatggcgccaataacaatggttttggtccagtcactgtcagtcgtcaaggccagataggcagagagaccaacggcaaaaagcaaaattagtgaggtgatatcgctgaggtgatggccgatttgccggaacaagctaggctttttagccgcggtgagctgattgcggccattttgctgcaaacgtgcagctgcttctttagcagtcaggccggttttggtgttcgtcgttaattcagcggccagatcgcttggcgttaagcgcgtcaagtgcttggtcgttgttgtcatgagttcattcctttcaatttgtcagagacacgatcattacttacttataataaccgtaacataaaaatattagtgttgtaaaatttaaaatgagtttagacatgagcaccatcagctagttcaaacatatttatggcatttagcttattcttttgtgctcaaaaaagccgctagcctgatgtcgtcattcaaacaacaggttagcggctttcttgattttaaatagtggcgcttgtggctagttttgtaatgcgtgataaggataacttgtttgttgcgtcgtttgggttttgaagccgtatgtgtcggcaacgatatagagcggtcgatggcggctttcagcgaacatcctcgcgatgtaggtgccgagcatgccaatggtgaaggtaataccagcgccaactagcaaggtgatgatcatgacccaggttaagctagtgaggtggcctagtgccaaactaagcccaaagagcgcaaccgcgatgatcaagaagaagccgcttagccagctagctaaagttaacggtactgtggaaaaactagtgatcccatccatagctaagtgcagcatttttctcagtggatagtgcgtttcaccggcttcccgttcttgacgatcgtactcaacggcaatttgtttgtagccgacccaagtgaccatcccgcgtacatatgggtcctgttcattcatctgcttgagaacattgacaacacgccgatccatcaaacggaagtcgccggtatcgacaggaatgttgatgctagtgacagccttgagtaagcgataaaacatttcggcagtcaacttcttaaaccacgtttcaccactgcgtttgcgccgcttaccgtaaacgacgtcatagccttcacgccagcgggctaacatttctgggataacacgcggcgggtcttgcagatcggcgtccatgaccaccactgcatcgccgctggcatagcgaatgccggcagtgattgctagctgatggccgaagttgcgggagaaatcgactaaccgaatcgccggatttttggccatggcggccctgatttgatcagcactgtcgtctgttgagccgtcattgacgaaaattaactcgtatcgttccggccgtgcacgaacgtaatttgccaaaaccgttaaagtttcgccgatgccagcactttcgttataaaccggcaacacaatcgaaatgaatggattcttttcttgtcgcatatcggggactcctttcatagagagatcaagacgctttatttcaccatgctggcatcgagttcatacaaggtgccaccgcccatgccgcctcggctgccaaagccttgcgtgctggacgatgaagtgccgccatattgacttgcggcaacctttttgccgactttggtgacccaagcttcaatcttcgaattgcctgagcggccagaggaaaggtaatacttcatatcgccctttttaacaagcgctttgaactgtttcaaggtaatagctggatcagtcccgttaaagccgccaatggccatgaccgctttgccagatttgatgatatacggggctgcagtgctggcgttgctggttgcaaacaggtatttggcattgccttgatgtttttcaacatactttaacaagccagaatctgctgtgccgttgccgagtccaccgttaccgctagaggagagcagtgatggaccggcagaaggaataccagccgaggaaccagctattgttggcgttaaggaccagaatgctggtgcggccatgattgctgcgatggcaacgcctaacgctgttttacaccatgctttagtgcggccgatgaacagaagtatcaaaccgagcaggccgccagcgatgactaagaatggctgccattgataatagagactgacataccaagcctgcaagcctgtggtgaccacgattgcgattggcaaaagccatgcttgccaatgtttcagatcggttttgaattgtttgaacatagtgacagttccgatgccgaataaggcggcaattggtggtgccaacatgatcatgtaataaggatggaagaagctggcgatggagaagaagccagcaacggggatgagccaaccaagccaaaagagcaagtgattttgttgaatggttgtctggtaccatttccgtttgcggtccaaatagtaggcaaaggcactgatgaagccaatgattgcagctggcagaagccaactgatttgtggacctaaatcagattgcaataggcgtaatggaccgactgtcccgatggagaaagcaccaccagcaccgccacgttgactgccttgacgaccacgtgtaccgcccttaaacgtcccttttttgaagttggcaggcattttgcgacctgtaccagcgcctctttcggtcgtcacagcgggttgcttcccagccgcgccagtcttagtgccgggcatttttgttccggcaggtggtgttttgcctgtgttgccggcaccaggcgttccagttggtttcctagcagtcgtgccacccggcgccgtgcctttagcaccggttggcggggtgccagcagtgccagtggagccggtcttggatttggtacccataccagggaaggcagcaccagttcctgtggtttgtccgagtaatcgttcagtgccgttgtagccaaaagccagctccaattcagagttagtttccgaactgccaacgtaaggccgttgactagtggcggttgaatccacctgtattggccaagcgagggtggtgacggccatagcaaccaaggcaatagccaaggtgcctaggcgccgccaaagtttctgattggaagccagccagaagaataagagcaaagccggcaaaatcataaatgcctgtagcatcttgatgttaaaagagacgccgatcagcgcgaaactcacaacaacgagccatggtttgcgattgctaatggccttcatgaggcaccaactggcgagtaagaggaagaactgaagggttgcatccatattattcgttcgtgaatcagcaacaacgatcggtgtcagcgttaacgccaacgcagcaagccgtgctgcccaaatgttaaagcgcggtttgatcatgttgtagatcaaggcgacgctgccaatcccgaaaagaatggatggcaaaacaacggaccaaccatgtacggcaaaaatttttgccgaaatagccatgaaccacaaggcaactggcggtttatcaacggtgatgaagccggcgggatcgaaggcaccataccagaagttatgccagctttgaatcatactggtaatagcggcggtgtagtagtcgttagcgttaccggcttcccaaatattccaagcatatagaaaggcggctaggatcagaatgccaataaaccaccaatcaacggtccactgtttaatttttttcatgtgcagcaactcccttttctcgaaatacccagaacttgcttaaaaggaagttcgttgggacagtgatcatcaatgcgaacataggtgcaagcggcttgggcagtcgtaagaaatcattccaaaaacttgtcaaaactaaacttagaatgaaggtcaggccataggagagataataacgcggtgccaccgttttgagttggcgtcgatcctttgccttgaacacccatgtgtcattaagaaataggccaaaaatggatgtcagcccgtagccaacccccatggcggctgtcgggttgatcagctgatataatgtcaagtaaatgagataagttaaaatggtgttgaccccaccgaccaagccgaagccgatgaattgtttcagcttttgacgcatcaaaccgctcccttcttggtgaatgggatcattatgagagttacagcataaattaaccttaaagtcgggcattctatttcttaagatggctttatggttatcatgatatggtcagaccagcagatataaggttaccaacaaataagtggggcagaacatgacagttaaaccgagaattcttgtgatcgaagacgatccggatttaaacgagagtattactgattttatccgcgcatttgccgacccagaagccgccttaaacggtgctgatggtctgtatttggccgaggaaggtatttttgatgccattattttggacattatgttgccagaattaaatggttttgacgtactcaagaagttgcgggcaaagcaaattaaaacacctgtattgattttgacagccaaagatgcgctgaccgataaattgcacgggtttgaacttggcggagatgattatctgacgaagccgtttcatcgtgaagaactcattatgcgtttgaaggcgttgttaaagcgaaccggtcacttctttgacgatgacggcttaactgctggtccttttgtggtacatgtgacgagtcatgaggtgctcatcaacgatcaaccagtggccttgaacggtaaagaattcgatctgttggtttatctattacaaaatcagaaaacaatcatcaccaaagatcagatttttgatcgtttgtggggatttgattctgaaacagctgtcagcgtggtggaggtttacatgtccaacctgcgcaaaaaattaaaaccgctaaaagttgagcattggatcaaaacgattcgcaacgttggctatatttttcaggagccggagggcagtgaatgaacgcagaaaaaggtattaaacatcagcaacgtcgcttattcatcgggcaactgttgagctttgcgggcttgtttgtggtattaggtatcattgtttttttcttatatgagcgctcaatttatcaagacattgatcacaccttagagcagcaacaagcaatgattcttaatccaaacgaagaaacgacaaagcttggtccgcagcaacccggtacgagagtcactcacccagcacctttccggaccaacatggtggtctttaatcaaaaaggccgcatcattaatcaagccatgcttggtgagcggttttatgcttactttaaaaatttaaaactggatcgatcagcgcaaaacaagttacagacattgaccacatcaactggaacattccggacgctattaatcaaagcacctaaatacagcgcagatcctcagtatgccggtcactatgtgttaattttgcaaaataccgatgcacaggaagcagcgattcgatcatttcggcaggttctgattgtcaccattattcttttttgggcattggcactcggcttgtcatactggttgtccacacgtgctatgcggccaattgtccggtcatggcagcgacagcaggatttcgttgccgacgcagcacacgagttgcgggcgccacttgccgtgattcaaagcaaacaggaagccctgctgacgaaaccacaagcgaccatcattgacgaaagtgaggcaattgcgacttcgttaggtgagacgaaacgcttgcgtcagctgaccgatgatctgctaacaattgccaaagccgatagcaacaccatcgaaattgaattggttgatcaaccttttgaaaaggcctttgaaccacagctgtcttcttatcaagatattgctgtcagtcagcagaagtccttcacaacaacgttacccaaggccggtcgtgcactgtttgacacggcgaggatgaaacaactgttagtgattttactggacaatgcctttaaatatacacaggcgggtgattctatctgggttgaagtgacacagacaccacgtgattggcagttgcaggttggcaattctgggccgagtattgcggatgctgataaagctcgcgtttttgaacgtttttatcgagaagatgcctcgcgtagtcgccaaacaggtggtagtggacttggtttagcaattgctcggtggattgtgaccatgcatcacgggcatattgaagtcaaggatgtccatcctcatggcgcacttttcatcgcgaccttcccaaataagccgcgtatgcgttgatcaaaccaaagaacatagaaaaagccgcgtcaaaaatcacaattgatttttgacgcggcttttctgttacgagttgttaagaatgcaccgagattacgtttcttgaaaatagcagttagcgagcagggttatttcgaacaccattggcttcggtgaagtcaataaagcccatattggtatcaatatcaccgccgtcaccactcaaaactaaggtagtggctgcttaaaaattctataattcaggcagttaagctaatatatgcattattgcggtataataaatccattggaattagctgttttcctgcattttccttgcattttttgggaagctactcggaggttatcgtatggtctatcgtcacagcccgcttcaattgtcatttgaatcctttggtgccggtttaagtaccccacttagctctaacaatgagtgggtccagttggcggaggtcatgccctggaaagctctcgatgaggcataccaattggagttcaccaaaaatgcgggacgtgcggcaaaaccatttcgtttactctatggggcaatcctgatccaacaacggatgggtttaactgatcgtggggtggttgcggcaattcgtgatacacccgcacttcaatatttcatcgggttgtccgaatacaaagcggttgagccgtttaattattccagcctggcacactttcgcaaacgaattgccgatatctccgagctgattacgaatatcatgaatgatacagtacgcgccaagatcgaagcgttggtcccattcaaagtggacaccgtcatcacggacgcaaccgcagtgccagtcaaaatcaagtatcctcaagacaccgtcctcctcaaccaagcaaggctgaatcttgaggcgatggcgatcgatatggcacaccaacttggtgtgccaaacccacgcatgtacaaacgcgaggcgaagcattgttggacctcattttcacgacatccaaagcaacagcgtggtggctttcataaacaggtcaaggcccaacttcaatatgtgcgccgtgatttgcggtacatcaacgaattcatcgatcagggtgcgactctaccagatgaacaagcgattcgcttaggcgtgattcgaattctatttgaccagcaatggtacatgtatacccacaagactcaccacgttgaagaccgaattgttagtctccaacagccgtacattcgcccaattcaacgtggtaaggccaatgctaaagttgaatttggggcgaagattgactgttcgttaagtgaaggcgtagtcgacattgaacgttttgatttcaccgcattctctgagggccaagacttcgcggaaactttagaccactattacgaccttcatggacattatccggatgaagtactggccgatacgctgtaccgtaatcgggagaacctaaagctgtgtaaggatttgggtatccgaatctgcggtccgaagcttggccggcatccaaaacacgttgatgcagcgaaacggcgtgaggatactgatgccgagaatcgaagaggtaccattgaacgccggtttgcttttatgaagggcacgctggggcttggcttggtgaacactcggacagctgaatcactggccgtcaagattgacgcggccatcgtcttgagcaatgtgctgaccctgttaagggtatttgctataccaattttaattttggctaaattcgagggtgaggcctatcaaattcgctataaatttactacaagggtcgaagatatggtggcctagttcaacagccactaaggtattcagcgttttgttaaagtggacattcatgtgggcattcaaatcttcttgcgaataacccttgatcagaattggcccaaggttactgtcaatttcagtgtcataatccgttgccggatcgctagcttttacgacgttaagtgagaactggacctgcatatggatcatcgcatgctgcgaataaggacccaccccatcttcaaacgtaagcagcaactttttgtcatcgcccagatgcggttggattttttcagtggcaccttcatcaaaatgaatttgcataggatcagctcctttcgccgttaacataggctgatttggcgttaaaagcaactgatttgtctcgcagggaaaatgacgttaaagccaccaaattatcgggtgaaagtgagtttattgtgattcaaatatcgacgcaccttaaaactcgcgccaagtttgaaacaagtttcagcatcttttaaatcaattccagtaatgtcactgatgtgcttgagccggtagcgcaacgtgtttaagtgaatgaaaagttgcctggcagtgtgggtgaggttttcaccagattcaagataagcgtccattgtcggcaacaactcagttttattctcagcatcatgatccatcaatgccttaaccgccggattgatgaaaaatggcaaaatttcggcatgatcgacctgtgccagcattaagtcaaagaaggcatcctcacacatggtgacgtgagttggttgagatttaagcttcgcagtacgactgcagacggcataggcagcgatggtatcttcaggccgcgtatattgattcgaaacgatcaaacgacagttggcacgatcggcaatggtcgctaaatcagctttaaattcagggttgttgtaagttggcaagtcgacagaaactaaggctagacattgatgatgataaagtgtgatcaaagtttgtgagaaaagcggggttaataaatactttagtcgctctttcaacgctgccaaagattgtccagcacgcggctcacctttaatcaaaaccatgcttgttggcaatgttgcatgttctttcgcaaactgagcggcaaaggtaccactttgttgttcggtaagcagcatggtgagcagttgatcgcgttttgaggcggcggtcggcatcatccggtttttgatcaaggagctggtgataattttggcttcggctttgaagaaggcagtttgttcagcggtgagcggtctgacgcaggccggcatgacgaggtagcctagggcattgttgcgatatgccaatggcagacataaaagcagcaagggcagctgggattgctgaatgagaataacttgcgggatcaagtctttagcgggtctgaattttttcaatgcctgttggacctggacagaggtaatagctggcgctgtcaagtcactaatggccggcgcttgcgtggattgcgccacaggttgcccgacaagatcaagaacaatcaagggattacctaatgtccgagcggcttgattaagaatcgtgtcgaagtcctctgtgatcgctttaatagcaagctgattaacctgtgcttgtaaacttgtttcggacgtcaaaagacaaccagcccgatcgaatagttgagcaagttgcgactcgttttttagctgcgtttgagcacacagggacagttgtgcagtcttgccaacagatcctgtcaaagtaatcgtttgatcagcagatacagcaagatacagtgaggtcggatgtggcgaaagagtcatatcatcgtcaaattgcagacttgttatttcggggttttggagactggtatcaaaggctaatgggactgtttggtcaagtcgttggagcaaagtatttaatttcattatttatcctcgaaggtgacgtgaaggtggcacgtgtcaattagcaaaaacatacaaatttatttgttcattcatgtgcaaactgtaccttcatcatacgttttgaaagcgctatcgtaaaggcgtattcgaaattgtgaataagcacacacatgaatgactgcgtgtgtggattcacgccacataggaggcaagcaattatgaaggattttaaggacaaggtcatgttcatcaccggggccgcccacggatttggtcgggtcattgctgaagaaggggcaaaacgggggatgaagctcgccttagtcgatatcgacaagccggctttgaatgaaacttatcaaatcgttgtggcaacaggggcggatgctgtgatgattccgactgatgttaccaaagaagacgaagtcaacgcagctattgatcagacacttcaaacatttaagcaaatcgatctgctgatcaatgatgcagggattgctttgccaggacgtatgtgggaattaccaacccgtgattgggaatggatcatgcacgtcaatgtgatgagtcaggtttatgcgatgaagcggattattccaattatgatggcgcaaaaaacgcatggggcgattttaaacgtcgcttcgatcgctggcttggtcgataccccaggcatgcctgcatatcacgccagcaagtttgctagcgtcggtatgagtgaagcaactgcttatgacctgcagcgggccggtgctgatattgaaatgcatgtgatgtgcccaggttttgttcagacggatctttatcacactgaagaacatcggccaaagcaatacagcgatccaagtgatccttactatcaaagcgaggctttcctgaaaggtcaacagtttgccaaatatgtgatcaccaacggtatgccacttgatacgattgcggcgacggttttcaaagcacttgaagaagatcagttctacattttgacccacccacagttcaacccattgattttggatcgggtcaatcggatcgtcaaaaatggtgcaccagatgtccatgtgatggatgggattatgtagttagttactttcgataacacgcgaatcagtgcctcaaccgcgctggcgagcgttcacagagaaggagtgtcaaaaatgtcgagttatgttgtgagtcaagaagacgtgaagaactttctgaatttaccaagtatgaatgatcaagaagggatcagttttgcctatgccacggatccagacgccttggccaaattgattccggcaccgttgaagttggttgcaccagttgtgtgcggctacgtcgtccacatgggtaagccgtcgtttggcggaccttatctggaacaaacgctatttgcccttgttagctacaaagacaaaatgatgggttcctatccactaaccttgctcctgcatggccctggtgctgaagccggcttggtggcaggtcgtgaaggtgcaggtattcctaagaagctcgccgatcacatcgaactgcggcgcaatgacaacagtgccagtgccacggtggaacgtcacggcaagacgctgctttcggttgattgggaagctggggatgtcaatgatccttccattttgcaaacatttggcagccaatttgccttaaacaaagaatccgaaatgaacagttttttcttcacccatgatcttgtacaggataaacaaggtgcgaaccactttgaaaatgttgagctggtcgccacgcagatgaagtcgttggctgatcgagttgagccagggaaactgtcgattcaacttgcatcaactgaagatgatccattcggtgaattgccagtgctcaagccgcttggtgcgatgtggtatcattttgcgacttcgaccatgttcaacactttgcatctggaacaagtcgatgccgataaaaccgccccttatttgatcaccggtcgctacgatcgcagcatgatgaatccgctggcaacaacctatattatttgattgaaaacggttaatattgatattaagaaatgaggcaaataaaaatgacagaaacagtagcaacaaaaaaattaactaataatgacttcgcagacgtgatgtttgatcgtcattcagttcgggtgttcgatccatcagttaaaatcagtcgcgacgagcttcaggaaatgattaaagaagctaccaccgcgccatctgcctgcaacttgcagtcgtggcactttgtcattattgatacaccagaaggcaaagaaaaattgaaaaagtctgccatgaaattcaactatccgcagatcgattccagttctgccatcatcttcatcgccggcgatacgcagtctcatgaagtttatcgtgatgtttggaccaaggtttatgaagacggcaaaatcagcaaggaaaagttggaccagattttcaataccttcctgccattatatgaaaatgcttcacctgaatttctgacattagatgccaccatcgatggcgccatggttggcatgcaactgctgctgacggcgcgggcacatggctttgatgccaatccgtggtccggttacgacttcaagacgattattccaacattggggcttgatccaaaacgctttgtgccagttatggcagtggctattggtaaggcagctgagaagccgattcatactgatcgctatgatgtgaagcagctgattgactatttggactaatatgacggcacaaactgtccgagatgagtgggcacgtttaattttttagaaatagagaggaagtttacgatggtcgatgcagtagagaccgatccattcggcaaagttgatgcgattgatgtgttggatttagccagtttggaggcgcgtgcggagaaaattcttggccgtggcgaatttggctatatcagcgaaggctctgacgatggttacaccatgcgccgcaacaccaccgcttttacagatgtacaaatgctcccgcgcgtgctccaaggagtggagaagccggatcaaagtacgacctttatgggagcaaaactggcgtcaccgctgttaactgcgccgatcgccgggaacacgctggcacatccaagcggtgaattgggcttagcaaaaggcgcaaaagaggccggtattatgatgtcgcaaagcacctttgcttccaagacaattgcggaaactgctgcagtcagcgacggtgccccttatatgttccaactttacatgccaaaagattggtcgtattgccaatatctgttagatcaggcaaaacaagcaggcgcattggcgatcattctgacagccgattcgacacttggcggctatcgggaaaaagacgtgatgaatcattgtcatctcaaaggccgcttagctaatcttgaaggttacaatactgggcagcagggagttggcgctggcggtttgtttaaagaatccatgcagaaactggatcttgcaaccatcgataagttggcctcttattcagggctgccaattattgtcaaaggcattcagcatcctgatgatgcggttgcggcgatcacagctggtgcagctggcatctatgtttccaaccacggtggccgccaactagatggtgcgccaggtgcgattgaagccttaccagcaattgcggctgcagttgatcatcgcgtaccaattatctttgatggtggcgttcaacgcggcacccatgtcctgaaggccttggccctcggcgccgatcttgtcggcatcggccggccattcagttatggcttagccctcggcggctgggaaggtgtcaaggcggtagccgatcacatgaagatggaaatcaacatcgctatgcaactaaccggttgtcaaacgatggctgatgtcaagcagatgcagattaaaactacttttgcataatcagagaaaatgtccacctgataagggttgggcatttttttgtttcagggaaaagatgatgattgttttggtaaatgctaacaacaaaaaatgccagcgacagtagactaaattgtctaactgtcgctggcgtttttcgaaatcaacactgcctgcccagcaagaaatgttgactattccttttaggctatgagcgcaagtttgatgttcggtgaagctaattgccagaagaaaatcactcatggatcttaacggacttgaaccgtcgatctcctgcatgccatgcaggcgctctcccaactgagctaaagacccgccatgaaagctgatataaaatggatccaaacggacttgaaccgtcgacctcctacatgcgaagcaggcgctctcccaactgagctatggacccaaaacacaagattcattgtactgaacttccggtctgctgtaaagaggcatgcttgtgaatatcagagaagaaaagctgccgtgacggacttgcacaatgaatcgaaacgctttattctgaatagtcccggcgtgcgatgacggcagtaatgatgttttgcatgacaccgccaatgatgaaaatgagccaagagtatgcccatccgtggagtagaaagctgacaagaagatagatgataagcacggtcggccaatagacttggtgaaaaagtgctatatcttggcgtgctcgggtgttctgatgatgcttgtgtggctgttcccaataattagcggcatcgtcatcagtaccatggtaccaagcagttgagtttgccgcagttgtcgcgtaagcataacgttttagctgagaataattgatggagacataaatgatcaggtagctgcctaggccagcaattgctagaaatagcgctccgccagcattttcactgataaaaccaggaatgtaggcagaaatgatgggtgggatgagagagccgatgcagatcataataccggcaatcaacccagcggcaaattgccgggtgtattccccggtggtcttgttgactagctgtttggcactggctgtgatcggtcggtcattaagctgctttttttgctggctgaagacggtgccgccccagatgaacagaccaactgcaagtgcagcaagcagaaacatgccaatcacaccgaatccttcccagcggcccccgcctgtgtaggcaggcaaggcgatactgacggcgcaaagcaaaacaccaagggcaatttgggtggcaaactgatcagccatgtgccagaagctgcgaagttcggtttcagtaatcgcatcttcatcggcttcttcctcagcatcggtggggtccgcctgtgttgttgtcgccgttgcttgtgctggcattcccagatcagcccgtagctcgtcaattgagccaaatgcgctgatgacagcaccaatagcggcttcttcgcttttaccttcgcgcaacaaatcacggtaataatcacgcatgttagcgagcatatcggctttggcttgtcgggttttgtcattatcaggtaaggaagcaaaaagactatctaggtaggtggtgatggtatccatgggcgattcctccaaggttaaagattcgttagcggctgttttaagaatggatcgacaacggttttgacacgttcccattcggctgctttaacagcaagaaaattacggccgcttggggtaatgcgataataagtgcggggcttgccattggtgacatcccctgggtaatcatcgatgtagccatttttgctaagtcggttaaagacggcgtaaagggttgtttctcgaatgaggtattgaccatctgtgcgctcacgaatttctttgccaattttatagccgtaggaatcgccttgctgtaaaatcgcaagaatgagcgcatcattatacccacgcatggcgtcactgctaatcacagcatgacctccctctatcgttatggactgatgcaaagcacatttcagagtgctttacatcagtactgcatctgttgaagtaatactagcacgattactctatcaggtaaagtaaaaaacaccctcatctaagatgaaggtgttgtcgaatagcggcttattagtggatgaaaactgtgatgaaagtcaccagcccgaacagaataccgggcatatttgagatgataatcggccagtctttgtatgttttagtccaaccatagaaggtccacaaagtggcattgatcatcgcaaccagtggttgaatcggattaaccggattcccggagaagttggcgatgatttcgggaatataagaaacatacattaaaatacaggtgaatgtcgcgactttactcaataacttgagtcgtttcactcgaacggggtcaaccccttcaggatactttccggtgtcaacgcgcattcataacgcctcctttttggataaaaataaccataacactaaattagtctaaacccaaggcatgtgtctgggtgtgatagaatcaagaaggcgacagaccgcggataagcggctctaaaaattttctgaaaacaagcagattaaggaggattacgatggcagaacaatcggagaacaccgtgacgcgaactcaaaagcaagaaggtgcggatgcgattatggataagggttacgtcactgagcgggatattccggaaatgatgagcaaaacatggagcgaacaacttcttgatgctgttaatgatgagttgcgcttgcgcacggtgaccaatcgtaccgtgttacagcaatttcactattacatgggtaacggcacgatcatttatgatccgggtcagctgaactctgaaggtgccaagatcgccttacagcacgccttaggtttccgcaaataaagctaaactgcttgtgatggttatcggcagtttagctttgtttgatggtcgtgagtggtattaagcaaacgggccagtcaaaacaaccttgcccacttcatggccaccttcaactagagcggtcgcagtcttaagggtgtcaaccgagatggtgtcaaaatgcttggtcactgatgccttgatttgatggtcctgatagagtgagactagacggctcagaatagcaccttgagaagccacatgataatcaaagtcggttttggcaaacatgtactcataatcaaaactggcagccttatctttaacaacggccaaatccaaaccagtttgtgggccaacaatacagcctatgtggccaaaggcacgaatcagttgactggctgctgccaagtaaggttctggttgataaagcaacgcgataccgtcgactgtttgcaagccggcatgttggacttgggcaatcaaatcctgatggtaatccagtggtgttgcaacgccgtgatcaagcagccaaggatgattttttggactgctagttgctaggacggttaaaccgctccaacgagctaattgacaaagcatggagccaacgccgccagcaccgttgatgactaacaagtgttgtcctttattagcgttgaattcggggataaagcccattttttcgaagagtaattcccatgcggttaaaccgacaagtggcagcgcagcaagatcggcatctggggcatcagctggcgcggcagcgagtaagcgggcatcaactgcctgatattgctgattactgccgggacggtgtgttgttccagcatagatgacgcgatcaccaggcttgaagccggtgacattggcaccgatctgtgtaatcgtcccgactgcatcatagccttgaatttgcggtgtttgatgctttccagcaacttgtcggcgtttcgtatcaacaggattgacggagaccccggcaacagccacgatcacttcgcctgactggggctgcggcattggcagcgtgaactgttgaagactgttgggtgccgtgattggcaacccttctgtaaagccaattgcaagattttgtgtcatcgaaatcgccctttctgtaaataaagacctactgtgattgtaacctttttccacgaatagttggaagttccggtttttttttggtaaaatgtgcaagatattgcaaggaacagtatggtgttggcacagttggcggttgatgaatctgcaggttatgaaccattgattgtcatactaccggttaccatgatgaagacagcgtgtgacgcggcagtgtttctaagtcgaagatcacatttaaggaggctgcatagtgaaaaaacttggtactaagcgcgaattgatcggtgttgtcattgtcttgctgttggcagcagtaggatttgcgctatttgcctggtatacgatgcggccaacagataccattggcacgattgccacgatttcttttggacttgttttgtcagcattgattggcattgtcctgattttagacacggcagcgaccacgcgctggcgccgattctgggtcgatctactttttgcggcattgatgttgaccctgattgattatttcttcttagataccacggcaccatggcagatgttggtggcaggagcaggggtcgctctggcgattgtcgcattgctggccattagaaaaatcgatgagtaagttgctaaaagagtcagatgaatagggtataagcctagtgaaagtaaatgaaaactccctgaaaattttcagggagttttttgtcgatacttgctgatggtaacaacttgtggcaaacgctatttgttattgcgccgctagttcatgcgttggacagtcacaggcactgtttttggcaaaactttcgtgagttccgtcataaagttttgaagacttgcttggaaagtcaggcgaaccatgcgccgtttgctaagagcgaaaacggcaacaacccattcctgaccattaggcaaactaaccggcgtcaacgtgatgctggacatgttcgcgtaaggaataacgcgcgccagaataccattcgcgattaagcgcgttggcgccaatccaccggtaccagccatgatcgacaaaaccaaaaagattgagatgaagacaatgtaaggcaaattgttgacccgagtggtcataaaccaaaagcctaggaaaactgcccacatcagctgggtgacagcgtaacgtgaagcaacttgaattttactttgccaataaagatagtaaccggcaagcgccatcaggatgacgtcaaggccgatcagaaaaacattaaaattattcatgaggaactcctttttgcttcgtgtcatctgtggcatgctcggcttcatagagcccggaaacctgttgataccaactgaagaagcgggtgaccacgatcttcaacacggcgaatcctggaatgccaagaataacgccgactaagccgaatagattacctgctgttaacaacacgacgacaatggtgatgggatgtaattcaagtttactccccatcacaagcggtgagatgacttgtgtttcgatgagccattcaatgaaaaagacgatgatgacagctaaaatcattcgcggggaggttagggcacccatgatgagcggcggaatcatcgccaaggctgagccaaagtatgggatcaaattcagtgggcatgccaataagccgaagataaggccataacgtaaaccgatcactgaatagccgaccatgaacatcactgcaacgcataaggcaacggtgatttgaccttggacataagaaccgaccttttcattcatctcatgcaacatttgcttgactgaccggcgaagtttagttggcacgatatgaagtaccatcggcgtaaatttgtcgccgtcttttaacatgaagaaaagaatgattggcgctgttgaaatggtgatgacgacattaccaacaatgccaattaagttctgcagttgagaaattgtgccggttacgaaggcaccttgtttaccagtgaagaaactttgcacttctgctgcaatctcattgagatcatgctgtgagagaatattctgctggtcattcagattatccaaccatttgccaatttcatcaaagatttgcggcgctgaatggacaatactggtaatttgattgcttactgccggaatgaaacgcaacaatccccacgccaacaaaccgatcagcacaatgaataacaggccaattgcccagccacgatgaagtccgaatttttctaatcgattaataatcgggacagtaaggtagaagagaatgccggcaaagataaacggtggcgcgataatcccgagaaaatccagtactggctggaaaacccacgcaattttagtgaaaacgaaaatcacgagcaatgccagtaacaagtcaactagcaggatcataaacttgctattaagaaagcggcgatagagccacgagtcggtatgtttcaagggggtaccctcctctacaattgtgatacctgttggatgtataagcttcatgacaataacaaacgatgagagcgactagccagatttgcggcagggcctgtttacgctcattaaaacgcgttcacaggcacagaaacctgcacataaggaacctccaacctaaatgacccaagcccggccatttaggttggaggccacttatgctccgatttctaaacgtgcctgttcacgctctgtaccattaatgatactcgactcatggtcatatttcgaggatagccgtgttaaaagcggattgatttgatgttaaaaaagattacataaaatttacaaacaacatggaataatcgttacaaatctttaaaaaccctaaataaaggcatcaaatgtaaattttatgtatacaaaggctttacaaaactcaaaaattgggtatgattagagtcacaaccaaaacggtgagtatatgtcggtttatccgatacggagaggagtgaccccacatgacaatcctacggggcgcaaaatggacattaattactctgaccctcgtggcaaccttgctgttattcagcaactttgcgacagccggcattttgttaatcgcgcttgatattttcttgagtttcttctacgcggtcatcaaaagcagatgtgatcggcgtcagatgcataagatgccattattgcataattaatttaaggatgaggtccacagatgctttttatctgtggacttttttgctatttaggcataaaatcattgcaaacgttcgttcgctttggtatgctttgtgtaatcaattagaactgaggcggtgagcggatgccaacacaagcaagtcagaaacgttggaaacaaattttacaatcaatctatgatgcaatcgaggatcatgggtacccgcccacggttcgcgaaatcggcaaatcagtcggtctaagttcgtcaagcacggtggcagcgtacttggagaaattgttggcggcgggacttattgctaaggatccagcgaagccgcggacgcttgaagtgacctcagccggacgtgacttcattggcgttcaggatcacggtattccgatcgtcggcacagttgctgcaggggtcccgattacggccatcgaaaatatcgatgattattttccggtaccagacgatcttccgtatgccgctgacgaattattcatgttgcgagttcaaggtaattcaatgatcaaaatcggcattttagatggtgaccagattattgtcaagaagcagaatgacgccgagaatgggcagattgttgttgcaatgactgaggaagatgaagccactgtcaagcgattttataaagaaaagaacggcattcggttacatcctgaaaatgacagtatggatgatatgttcttcccggatgtaacgattcttggcatcgttgtgagtttatatcggcctgcattagtttaaccatttgaagtcgtgaatgactaggctggcaacttaaatccaattaaaatgtaccatcaacaaaagagacatcagctgtgatcccacaaaatataggatcacggctgatgtctttttgctcagacactttattggttttgttgggcgaggcgatcgagatcgtcttgtggcacctttttataaacgggaccatcgggcaactgctttaagttaccggtttttgttaattgaaattgtatcgtattagcagaggcttgcggctgcgctttaccagtgaaggtgaagattcggcctttgagggtcaaatcaacagcaaaaataccactatcagtactttcaaagacaccatctcgattggctaatgtttcaagatagtagccgctggtggatgaggtgactcgaattgctttggtcgcatcttttgtttggacgaacgcatggccaaccaatgtacctaaggtcgctttcggaacagtttttttgaccgtgtgcgattgtgatgttgcgctcgatgatgatgttgtctttttgggggttgaggtagtttgtgagcagcctgataagatcaagattgctgctagtagcagatagcgctttttcattcgacagcaactcctagtgaatgaactggatgcaagtcatcacgattgggatcacgatcatcgaaagcagcgttgtttcggtgaccatgatagcagcgtaatcggaatccgcatcgtacagtttggcaacaacaggcgcattggtcatgaccggcatgcaagattgcaaaataaagatttgtttcatcaaagttgggacaggggcgaaggcgacaagcgccgtcatgagtaacggtgcaaagaggaagcggccactgaaaatacccaaagcttctttgctgattcttaatttaccccagcctgcttgatgcaaagcgatgccaatgaagaacatggagccaggaacagttaaggcaccgatataagtcagatcggccatcaagaaagtcggcaatttgatttttaaaagcacaagcacaatccctaacataaaaccgagcaacgggggtgagaacactttcccaagtgcctttttcaaatcaaatttagctgggcgcgggccgtcaccttgaataaggtaaacgccgatggtccaaaaaatggtggtgttggccatgtagtagaccaacacatatggcagactacttggcccaaataaggctaagttgacaggcaagccgataaaaactgtgttggagttaaaaaacattgacttaaaggtacccttacgtgcatgtggcaccttcaataagtagcaaaccagaaatgatagggcaaataggatcatcatggaaaggactgggaaaaacaaatctggcaagagtcgcagcaacattggcgccgtgaattttgaagcgatcgtgacaatcatgtaggctggcaaagcaacttgggtgacaactttggcaatgattttacttgaatggtcattaaaccacccgcgtgctgtcagaaaatagccgattgcgattagaatcaaaatttcaagaacaccaaaaacactggaaataaatgcggtcaaatactgacactcctttataaaattattttggccgccgcagtgtaaaggtgcgtccaagctcggcgtatgtcggcccggcgaggcgggcaatcggcgccaaagcggtgggatcaatgtgaagcgttgtcggatcaagaaccgtatcggcaaaatggaatcggtgcacttctaaaatgaaaagatcagtcaaaatgtcaccatcagcgttacgaatcggcacgtattgataaagcttggtttcaaatcgaacacgcgctgcctgcaaccccggcacctgaatgtccgtacttgcaactaacggcaggtcaatcaacgacaactcgctttgatcaggtgctaagcgggcagctgtttgattcatggccttcgtgagatctgcactcacgatgtgaacaacggcctcgtggcgcgccaatagatttgcagcggtatcttttgcctgaccccgatcacgtaaaactgctactgacaacagtggcagttggtttgaaatcccggtcgtaaatgaaaaaggcgctaggttaatgaggccagtcgtgttttgcgtggtaatccaagcgattggccgcgggatcatactgccagccagcaatttatattgatcacgcgcggataagtcggcggcagcaaggttgaacatcgtggtcctccagaaagttggtaacgcggcaggtgcgttaaattgagtgggtcgcatttgggtgtggtcatcaacttgatttttcccactatggttgcaagtttagcgcaggtagttggcggcgtcaaagtggaaccatcatttggcatcattgatgtcagtcatggcatgttttttaaagtcatcacaaggatgtcattgatcatataaaaactgacacctgaaaaatcgggtgtcagtaagattttttaagggaatcaattaactgggattactgtttgaagctgacgagctgctgtctggtgacggggatggttgttcactagatgcgttcgaattgccgtcagtttgggactcgttttgaccgttattgttatttccattatgattgctaccgctattatcaaccgtgctctgttgactttccacactcggctgaacagaaggcgctggcgccgctgatgatggtggctcgcttggttggctaacgatgaccggtgcactgctgacagtgcttgactgtgcgttggctgtttcttgcgtggttttgaatttagccagactggttagctttttcttcgatttgcttagtggcaaattggtctcaacatagcgataactgtgcggtgttttgtttttcagcgtaatcgtgttgttcaactcggatgtgagcgtcttggtgtagcttcgaacagtgccggtcgcgccatcgactgaatactggcgaacggcagtcggcttattgttcttgtacgtcgtcgcacttgcatattcataaacattagcgtgttcggatgtcaatgttagtttgccatttttacgcttaaaactgccggtgtcattgacgacaaatggatgcccatgaggatcgagaatgagcaggcgagtgtaggtttggtcatctgtcagcttaacatagacggttaagtcatgttgatcacggtctagatcgatgaccgtgcccgaagccttataagtaccgctgttaaatgggtgtgtgacggtgactgaagatgaaacactgctgctggaagatgtcaccggtccttgaactttagcaccgcgaagaacgagccacataaaaacagctacaaaaataaccgcggcaccaataccggtgagcgtgagataaagcgttcgacgattcttgcgaatacgttcacgtcgcatattgtgcctcctgaaataagatgaaaaaggtttattttaatataaggaatgtccagtagaaaggcaatcttttaccaaatgcttaacctaaccgttacacaatgacatccccattagcaagaatcaaggtttgaattggaacatcaaacggctccacaggccaagccacttgcggaaacgccatcacgggtggtaccagtgtgatcgtgttgccgcgataagttgtcagaaagcgatcataatagccgccaccgaaaccgatgcggtacttgtcagccagcgaaaagccaatgccaggcaccaaaatgagatcaggggcggcatgaatctgatcggcttgataaggcggctccgggataccaaaagcactggtgatcagcttgtttttgccaggatcaggtaggaaaaccatttgccgcttgggcatgacccgtggtaagtagacggctttattggcgtcgtgggccgcctgaataattggctcggttgggacttcaaacggtccgcttacggtaacaccgatgctgtgagcacgttgccacataggtgtttgaactagtgcggccaaaagcgctgcactggcagcctgagtcgctttctggacggctttcagacgttttaactgaagcgggcggaattcggctttgcttggcatagtgacctcactttgttttgagtagttcgcttagaacaacggcttggttatgcgtttcgtccttggcaccatagagcataatgactggctcttgttcatgttgcttcaatgttttgatgaagtctggcaggtcaggattagctgctaactcagctaagtaccgcttcttgaattcagggtacttttcagggtcgtgaccaaaccacttccgcaactcagtggacggcgcaatggttttggcccataaatccaaagcagcgttaactttgctgatgccccgtggccaaactcggtcaacaaggacacggaatccggatgcttgcggtttttggtagatgcgttcaagtgttactttcaaaatcatcacctcactgactattctaccagccttggcaactagtggccgaatgggaggatagatacgttataataaaagagaacgtgaactggcgcgtgtagcaatccgcgtgtgagcattttgtacgggattggcatcgcggacaagggtgcatacagaacggcctctgcgccagtaaacgcgctttaatacggccaagaggtgttgaaatgattacgcgttatcagatccagccacgaggaaatatgcaggtaaccacagacgatcaggccaactggattcgagtttcggcgccgttgcctcaagaactacagacgctggcgacgacatacgggctgccagcaacctatctggcggcagcaaccgatcaacatgaaaatgcacgagtggagggcttaaatccggcagatcaggtaccagggttgattgttttgcgttacccagttgaaacgaccagtgaaacggggtttgatcaatacaatacggtacctatgaccatgattctactgaatgatcgtgtgatcacgattacccacgatcccttacaagctttcgatgatttggctcaacaaaaactttctcctaagcctgaagagtttgcactggaagtcctgtggttggtgctgcatcaattcgtgattgcaatggacaagctgaatgatgaaaccaagcaaattgagcgcagcttaggtaaggcggccaaaaacacgcaactttatcagttgatggccatgcaaaaagggctggtgttctttgatgcggccttggatcattctggtacgctgcttaaagccttacgcgacggcgagcgcttttttaatacgaatgggtacttacggcggttgcatgatgttgaagttgaagtggtcgaggctcaaacgatggttcggatcaccgagaagttgctgacgcagtattcaactgccgtgagtgccattgtttcgaataatttaaacttgattatgaaggtgttaactagcatcacaattattttgacgattccaaccattgtgggtggtatatatggcatgaacgttcgcttaccgtttgccaacgcttactgggctttttggtggttaatcggcggcacagccatcttgtgcggcttggcggcatggtggttgtggcgtcaggattacttttagcattaggtactttgaaagtgggtgtacaaatccccgtgacgtatcgctatcgtcacggggattttgtgtgcgtccgtcagcctgagtagaaaccggcgcaagtacgaggaacgtgatggccggccttaatccttgcgaactagatccttatgcggagctttctgggttggtgaggcacgatgttgcagacgaattagtccgttttcacgactgacatgacagcgttagtttgccgcaaggatttgattaaagcgctgcattgccggtgtcaaaacgcggtctttgcggcggacaatggaaatggtgaaaaccggctgttttggatcagtgagtttgacagccgcaagatggtcatcaggattgatggcgagatttgtcaaaaaaccgataccgacattttgcgccaccatttgcttaagaagttgcacatcaccggtttgatagaccacgttggggatgaatgccgactgttgttgaaaccatgtgaaggcgcgagtgtggacgaaggcttcactgagcgtcacgaatttttgcatcgccagttccgcgaatcgaaccttgtctttttgggccaacggatctgattcaggggtaataatgacaaatggcgccgtgccgatttggctgatcgtcaaatctggctcctgtaatggtccactggcgccaagtaaggcaaaatcaagatcgccttgtttgatttggtttagtaaggcggcggatcctgcttcaactgtttgcaattgtggcattaagccggcggcaataagctgcggtgcaatttttggaaagaagtagttaccaataattggtggcaagccaaatcgaattttgttggtctgatcccacgcaatttcctgctgcgccaaggtcaactgctgaaggatcacttgggcgtgtgctgctaactgtttgccagctgacgtgacaccaatgtcgtgatgacgccgatcacgaataatgagttgcgcttgaaaactgtcttcgaggcgcttgatggcggtcgtaatcgttggttgactgacggcaaactgctctgctgtttgtgaaaagttgcgggtctgcgttagcgccagaaaatattcaaaatcgcgtgtgttcaaagtgttacctccatgaaacggttgatggggaatagaagaccaattctttgattaaagcatataaaaatattttatcactcctgctgggtttgactataagatttgtcggcgtgtaatgtgacctgctgtaaagaagaaagcccgagcaatggctggttgctaaccgcgctggctcgcgctcaactataacgcgctcgcagtcgcagaagctgcgcataaggaccttgagtcaaaatggccaagatcgggccatttgggttcaagcccacttatgttccggtttctaagcgcttctgctcgcgctcaactataacgcgctcgcagtcgcagaagcttgtgcatatggaccttgagtcaaaatggccaagatcgagccattttgactcaagcccacttatgctccagcttctaagcgctcttgctcgcgctcacttagaaggagtgttgattttgaaatatacaccagagcaaattattaacgatccgtttttaaataagggtaccgcctttactcaagcagaacggaatcagtatggcttgaatggtttgttgccaccagctgtccagaccttggaccaacaagttaagcaagcttatgctcagttaacgaccaagccgactgatctggctaagcgtcagttcttgatgacgctttttaatgagaaccatgtgctgttctataagcttttttccgagcatatcaatgaattcatgccgatcgtgtacgatccaacgattgccgatacgatcgaaaattacagtgcgctgtttgtcaatccgcaaaacgccacttatctgtcgattgacgatcctgatcatatcgaaagcgcgctgaagcatagtgccaatggccgtgatattcgcttgttagtcgttagtgatgctgaaggcatcttgggaatcggcgactggggcacccaaggcgtagatatttctgtcggcaagcttatggtttataccgctgctgctggcattgatccgagtcaagttctcccggttgtgctggatgttggcaccaataatgaagcactattgaatgatgatctttacttgggcaatcggcataagcgggtatatggcccgaagtatcgtagctttgttgatcaatttgtcaccacggcagagaagctattccctaatttgtatctgcattttgaagactttggtcgcagtaatgctgccgatattttaaatgaatacaaagaccagatcaccacgtttaacgacgatatccaaggaacagggatcattgtgttggctggtttgcttggtgcgatgaatatttctaaacagaagctgaccgatcaagtttatctgagctttggtgccggaacagccggtgccggcattacctcgcgggtatatgaagcctttatcgaagaaggcttaagtcctgaagaagccaaaaagcatttttacttggttgataaacaaggcttactttttgatgacatgtctgacttgacaccagaacagaagccatttgctcgcaaacgcagcgaatttgcaaatgccgatgcgttgacgaatcttgaagccgttgtcaaggctgtccatccaactgtcctagttgggacatcaaccgtgcctggaacctttactgaaagcattgttaaggaaatggctgcgcatacggaacgtccgattattttcccgttgtccaatccgaccaagcttgcggaagccaaggctgacgatttgatcaagtggacagatggccgtggtctgatcgcaactggtgtaccagcggctaatgttgactatcaaggtgtcagctatgcgattggtcaagcaaataatgctttggtttatccgggccttggcttaggcaccattgcttcaacagccaaatttttgacagattccatgatctcagcagcagcgcacagcttaggcggtattgttgaccctgatgaacctggtgcagcggtattgccgccagtttccaagctggatcagttcagtcagactgtggcaattgcggttgctgaagatgcggtgaagcatggcctgaaccaaaagccgatcaaagatgctaaacaagcggttgcaaatatgacatggcaaccagaataccggccactgccggattcactcgaaatggacttgggggaataaacgttgactgcattaagtacatccattcaaagtgttctgacgattgttttgctgatcgtcgtaggttatgtgttgcggcggcaaggacgctttgatgatcaatttggtaaaacaatttctgatttgttaatgaaaatcgccttgccagcatcgattttcatctcggtcttgcaacgcctaacgttggataagttggtgagtctatcatcaggccttgtttatggctttggtgccgtcattttaggctacctgatcgctttcttactggtttggttattaaaagtgcgcccgggtcggcgcgggacgttcatcaacatgtttgtgaacgcgaacaccattttcattggtctgccacttaacctcgccttgtttggcgataaggccgttccttattttctcatgtattatgtggtgaacaccgtgtcgacatggactgtcggggccttcatcatggcgtgggacgatccaacccagaagaaatcagaaaaaagcagtactggcttcaactggaaaaagttgttgccagcaccgttagtcggattcttagtcgctctggttttcctgttgttgaagattccgtttattcacgtcggttggttaagctttgcagtgaatgcccttgattatgtgggcagtttggtcacaccgttgtcgttgatttacatcgggattattttggccgatgccggtctgaaagcgatccgctttgaccgcgataccatcgtggctttgattggtcgttttgtcattgcgcctgcattaatcgctggtttgattctgctggggatgcatgctgggttcaacgtaccaggtcttgaagcgcaaactttgatcattcaagctgctgcgcctggattggctgtattgccaattcttgctactgaggcgcatgccgatgttgagtatgcgacaaacgtggtcacaacatctaccgtcttgtttgtggttgtcgtgccaattttgatgatgctcgttcagggcttagcttaaacgtacgaaaaaagaagccgatcatggcttctttttttgtgcgattaatgttgatgagcttctagataggctaaagcgcttgtgtaatcaggctcatgtgtctgttcggtgattagttcacgatatttgacagtgccggtgccgtccacgatccaaacgctgcgagcatcggtgtgattatcggccacaaacaagcccatagccttgccaaagtcgccattttgatcagacaacaactgcatttttttcacgccttcagcggcacaccacgactgttgttcttgtggggtattggttgaaattgtatagaagtcagtatgatcaaacgcatccatatcttcattgaaatgtttggttgagatactgcaaacgcgtgtgttgatgtctgggacaacgctgattaacgttaatcgcttgcttaaatcctgcgtagtaacgggttttgcctgtgcattagtaacggtgaacgtcggcaactgctcgccgagttcgattggtgtaccattcgttgttaatgcttcgccatgacgggttatttccaaagggctcactccttatatcgttaatgtggaatcgttcaagttcagtatcagtgtaccacgattctgaatgccatcagtgtagcatgcatttggatgaaacgaaattcaaacaattaaatttgctaaaattcattagcatatatattgacgcgaatataattatttatgtacattaacaataagcaaaatcatgccagatttttacaattgacgtaatcggaaatgttagcgagcaaataaccggcacttcaggtgcgagaaggaggtggtcgaatggaacaagcattggttgtttacgcttcggagacagggttcacgcaacggtttgcccttggcattgcccaggcactgcattgtgaattaattgacgtgcaatttgtcaccactgcagacctgcaaaaacgcaaaattatcatctatggcggccatctcgtaggtgaaaaagtcttgggtctaaaggccttctaccgcgaatttcaccagtctttacctgatcagttgatagtctttggtagcgggattatccgacgggaacaagtggcaattaagcaaatcaagctacagtatcagaaccgctgcgtcatgcctatcgatttttattacttacaaggccaacccaagctaagtcaaatgaacctttttcggcgtatccagacgagccttgctttaaaacaattaggcgccggtcattgcccggcaattcatgaaaccattcaacctcttttgagggcagtggtgcgcttgttggatcaggcaaatttatgatcgataaaatcgtaaaaaaaagccgtcacttgagcggctttttttggctggggtacttaatcgatatagatgccaaagtatttgtaagcagatgtagccgactcatttaagatgattcgtcgagcgtaattaaaatagtcagcaagctttgacaacttgagtgtattggcaatttgcacggcttcgtttaacattgctgctcctgtattccgctgaccataacgaacctgtaattccccagtgcgaaatttggcacgtaaggcgaattctgcatcttgctgctcaaccagttcgacctttaactggtttaaataagtcgcgaccatgtcataattttggcgcaggaattcaagcgttatctgattgtctagtaaatggaatatcaactttggggcactgcggtagtgactgtagtggcggcttctttttaaggcgagcgtcaataatcgccgttgcgttacaggcggcatggcaatgctaaagatgatgaagagataaatgtcgaattcaccccaattctcaatacgttgcaagtattgctcggtggcatgggttaaatcaggtctgatgggcaactgatgggctttatcaacgacgagtgattgaaaagttgcaagaatgacgacgcgcgcattgactgccaattgttgcttaagattagggtgtcggtctaaagcggcttgagcacggctaatttcctccttcattacttgaatcgctttagggaagtcttttgggtcggcggacagttccaaagtctggccaaaataagttcccagtaatctgtctcgggtggcatagtcgtgctctctcccagcagttaccaaaaatagaaactcttccggcgtggtgctaagtcgttcgagcaagtgagctaactttgtgactgtaatgtcactttggtcgcgttctatcttagaaagataggaactgctgatttgtgcatcggcgacttgtgcaagactcatacttttgttggtgcgaatggtacgaagcaattgaccaatcttcatgacaggttgcctttcatatatgacatttattgtttctctcagcctatacctgactatattgaacagcaagtactaaagcgacttattggtcaacaccaagtcgccaaggttaggccaaagggggaaatgtaagatgatgacatggcgatatgggcgcaaatggcaattgattctatttgttgggacgagtgttttgatgagtgcgatgaatgtggggttgcagcaagcttaacagctatgatccaagcggcgacggcgaaatccgcaacgttattattacaaacattgctgccaagtttattggtcttttccggagctgctgtggcgacatgggccacaatgttgctacaggccgccattattcgccaagtgaacttgactatcaagaaagtgatgacacggcaattgattgatcatccggatttatcaagttcgcaaggctcagatctgtcgtttatgaccaatgaccttaaaatgatcgaaaccaatggcgtgaccagtgaactgacagtggtcgggcaacttatcacgtttgttggggcaatgattggcgcgtttgcgtttgactggttgacggcattgatctttttcctagggaatctggtgccgttagttgcttcaaaagtcgcccaaggacgcttgcgcacagcagcgtcagattggtctgaggctaatggtaactggacgtcagggcttaaaaattatttgagcgggcgcgatacaatcagcgtttatcaagcagaaggggttgttaaaggtcgcatccatcaactagccgatcagcttgaaaacagtctgcggttgttaaatattttgactagtagcatggattcgttggggatgttattagcactttgtttcggcgttttactgccatttggagttggtatttatcgcgtcattagcggcgcgtcaacattagcattgtttatgggtatcgtgcagctctcaaatgacatgcgaaatccgctcgttgtgatgattggtgctgtgaacaagtggcagacagcacagccgcttatcgcaaaaataaatgcggcgaatcatgcaccaacagttgaatcctcattgctgatcaggactggggcgatgatgcttaagcacgcagaggtggcgattgacggccacaagattctaaacggactcaatttgacgatcacaccaggtcaaaaaattttagtgatggctccctccggatatggcaagtcaacgctgctccggctgctcgctggggagttgccagtagcagccggtcagtattggatcggtaagaccctagtgaccgcaaaaaatacgcatcaattgcggcaattgtttggcctcattaagcaaacaccgtttatgtttgatgacacgattcgctttaatctgacgcttggtgaacgtttttcgcaagaggctttggatcaggcagctactgactccggtttgacaccactcatcgcagagaaagggtgggactatcaagttggcgatgaaggccacaatctgtcaggtggacaggcgcaacgattagagattgcccgcgccctgttacgtcaccggccaattctattggcagacgaagcgacatcagccttggatgagcatttaagcgatcaattacatgctcatcttttgaaaagtcctgggacgctcattgaggtcgcacatcatattagcgagacatggcaaaaacaatatgatcaggtgattcgacttgacgagcttgctagtcagcaataaacgcgaaaccgtttacaacgaagaaaaagactggaaattaacgatcaaccgttcattgcgccggaatggcacaatttagcggtgatggcttttcccagcctttcatgatgaggggctacttagaaattgtggtgctaaatgtgtgatgcagtttttgtcattagccattgatttcatgactcagtgaaataatctcatccactgttctaccgaggaaggcaatggtttgcttcaaggcggcatctgtggtgacatcgacaccggctacccgagcagcagcgactggattgagtgagtcgcctaagcttaagtaacgcaaccagcggtcaacggcaggttggccttgttgttcgatggcttggaatgcctgagtagcaaccatgagaccagcggagtacgagtaggaatacaatcccatatagtaatggctttgtcgcatccatgtgagctcggcgccttcttctagttcaacagccggtccccagaaatcagtgagcacttgacgtttgatggcattcaacgccgctgcatcgaaactgtcgccggcgtcaatgcgttggtaaactttgcgctggaacgcagcttcaagtaagtgggtgacaaagttatggaagtaggtgtcgttgagtaggcgggacaaggcgaagcgtttcatctgcggatctttagccgtttgatcaagatagtgggttaataggagctcattgaaggtcgaagggctctccactaaatagtcattgaaatcagcatcgagaatattgtgtgctttttcagagcgaaccatttgtgccgtgtgcccaagttcatgaattaaggtgtaaaccgcaggcagggaattactccacgtcatttcaacataagggtgaacgccatagggacccgcggtgtaagcaccggagtccttgccttgattggcagggaaatcaatccagtgatcggtgaacgcctgcatcatttgcgcttgataatcatggcccatgatggcggtcgcctgttcgatgtcttgcttggcctgatcaagcgtaatcgttggagaataggcaggatcgatatcgatctgaaggtcggtataaccgatatgatcaagtccccacaattcctttacgtgggtgatatatttgcgcatgatcggtgccagatcgtgcataatcacgtcgatttggcggtcgaacatggcccgactgacttcctgatcggccagcaaataatcgatgacggaatcatagccgcgcatggtggcagtgattttttcacgagtgacttgtgctagataaccagccgccatcgtgttttgataccgacgcaatgtctggttgaactttgcataggctgcacgccgcacttcggtatcaggatgcttctgataattttcttcatacatcacgaatgacagcggataggttttaccgtgagccgtgaaggtgccaaaatccatatcgccgaaaatcgtttggtcgcgaatattgctaggcgcttggaaaacaggtgataactcggctaagaccttctcagcagcaggagccaaagcgccttttttagcaattttgatttggcggaaaaagccagcatagtcaggtgccttggcaacaacggcatcaaggacctcttcaggtaactgggttagttctgcttgaaagaagctcaattgaccaccaatttcaccatctaaagccgtggctttgatttggcgatcacggagtttaggatcagtggtatctgtcgaatacggcataaatgcccagtgtccaattttactatcaagttcgataatcgagccatagtcgcccagggcatcaacaatgatggccggttcggtcaactttccttgatatagatggacaaaatccttggtcaaagcgcgtacttgcttaatggcttcggtgtaagcaaactcatcagcaaaaatcggcgttaaatcccaagtcagttttggatcaacctcttgacgttttggcagtgcggtttcactcatcgaaaaaacctccttcgcttaatgggtaaagtatagcattggtctgcatgattttgttctgtggaatcgcatggggtagatggaaacgcatatccacaaaaagcgactcgtggtaaaatcattaaaaaggatgtgttatatatatatgggaatcgacaataatcagctcgtggcgcgctattttgatcgcaaagctgatcatgcagcattcttcaaggcgttagaagcctatttggatgatcagattaatgaactgtatacaacgttgaatgatactttcgcagatacggtgacgctgtcattagatgtggccatcgctaaggcgcaccaagccggcgccaagattgacgatccagcggctgaagaaattgcggcaactaactatttattcaaagaactctcttctcgcggcttgtggctgcaatcacctgatcaaaccgaaccgaacaccatcatcgctaaattgaatttcggtaatcggcggacttattattaagcctgattgatcatcaaacgagaagttgagacatcattcatagtaacgaaaaagcgggtctacactttctggtgttgagaaataatcaacactgaacgtgtaggccctttttggataacgcaaaaagacacctactcagtgtccatgctatgcttgttagcgtcgaaaccaaaagcaagcgaggttatgagtaaatgtcccaatacgatcctacactgtccgtccttggaataccagaccataatatcaaagttgcctttgttcgtcatgaatatcgcggcaacggggtacgtcgccgccagtatcatgtgattgatgccgagctgacttaccggttaacccggtgcccactgtgcggctttgaggccttgcaccctaacgggttttacacggcccacgtgcgcgtcctcaacggggttgaaatgccgacagtcattgacttgcacaagcaacgatggcgctgtcataactgttaccacacagtcagtgccaagacgccactcgtgcaacccaaccacacgatcgccgctcacatgacagagcgaatcatgaagttagcgcatgaacggttgccagtcaaaaccatcgcccgtattatcggaatctcagcctcctcggttcaacggatcattgaccaaaatctcaaactccgaccggctcgccggctacccacgcaactctgctttgatgagttccgttccactcatggcatgatgtcgtttatctgtcttgatgccgattcacatcatctgattgccttgcttggtgatcgatgcaaccgcacgattaaaaacttcttcatcgctcattattcactcgctgaacgcactcgggtccagacggtcaccatggacatgaatgcagcttatcagacgattattcatgaggttttccccaaggcccaagtcgtcattgatcggttccatatcattcaacttgcggctcgtgcccttgatcaggtacgcgtccaagcgctcaaacagcttgatgacaaacacagccgtccttataagatcatgaagacaaactggcggctttttcatcaaaccgcgcctgacgctaaacacaaacagttcctgtttggtttgaatgaatacgtcacgcaacaggaggccatcgatatcgcacttgatactgagcccaagctcaagcaaacctacgagacctacttagcgcttcatgatgctttgatggtgaagaaacatcccgcggaactggcaaacctgttagctacttacgagccaaacggtacggcaatggacatgacgatcgcgacgcttaagcgacacaaagtcgctgttctcgccgctgtcaccagcccttattccaacggtccgatcgaaggggttaaccgcctcatcaagtcactcaaacgatcctgttttggcttcaagaatcagctgaacttcttcaaacgaatctaccaaatcacggcataacatgacaaagacggctccccaaatggagaaccgcctcaaatgataaatttattcttcaacaccagttggcgtagagccgaaaaagaggcatgattttctgacttggggaaatcatgcctcttttactgcgtcatatggataacttgttaggatctaaagatgccagtgccaacgctgaacaatcgtaggccagatggggctcgaagcaccgtctccgttctagctatgtgttgcaagccggatctaaccggaaattgcggaatttagcacggcaagggactctttttacattaccatggcaatttacccgcggtttctgtaaatgtcatattcaaatcagggctatcgtcagcggcgagtttgacgatttgagcagcaccttctgcaaccgtttgttcgccgctgcgattaccaccaaaatctgtgcgagtccacccaggattgactgagttgacactaatgtgatctggctgtaactctttggcaaaatcaatggtggcgaagttcaccgctgcttttgaggcttgatatccaagtgaattcacctgaaagaagcgactgtcaggatcgctagccaaaccgagtgaacccatgttgctgctaacgttgataattttagcgggagcacccttttttaacaacgggatcatcgcctgtgtgacactgactaagccgaaaaagttgacctcaaagtcttgacgcattgtcatcacaggcaattgtgaaggtggttgatgggcatctagggcaataccagcattattgatcagaacattgagatagccatgtgaggcttcaatttgtttcgcggccgtcgcaatggtgccggcttgggtcacatctaagatgaccaattctgccgatacgccagctgtgtgcaacttgttaatagcctgttcaccgcgtgcctgattgcgcgcaccgacaagcaaatgctgaccgcgtttaccaagcgccattgcggtttcaaagcctatccctttatcggcaccggtgatcaaagttaacgtctgtcgtttaaccatgatcctcacttctttcaattattgaccctatttttctggctgatgaggggcgtattgacgatcagggaaccagattggaatttcacgtcgggcacttgtctcactatcggaactgtgaatgacgttgcgaatagttttgtcggcccattcacggccaaaatctccacgaatcgtgccgggcgctgcttcggcgggattcgtggcgcctgtcattttacgcaccgcttcgatcacattgaagccgctcacgatcattgccaccatcggaccgcccgtcatgaagcgttcgattcttggaaagaaaggctcaccaacaagtgctgcgtaatgctgatgtaactgatctgccgttgcatgtgtgactttcagtgcatcaattgtgaagccgcggtgttcaatccgcgtgatcacatccccaatatgtccgtttgcaacaccatccggtttgaccaagactaaagtttgttcttctgccatgtgtgtgtgcctcgtttccttaactattttcagaaaattcctgcaatctcagtatacacgagtcaccgtcgaacaaaaaaggtcgttgggcattttcatcgttttcatcgccaattgatttttgacaaaacacggcgaccaagaaattcttgaattaacaagtaaaacggaacagttgagatcatgagtggcaaataaattaacgcgagctgccactgccagagattgacaagtgaaaaaattgagctgaagacgaagaagacaagaaacagggcaatgctgagaccacccagtaggccaaccttgagtcggttgaaaggtcgggcaacgacgagcagaacattcaatgaaatagtgccaatcaacatggctaccattgatgaagtagactcaaaactcaagtggaagaaagactccatccatgtcagcagtaatgtgtagatgacgacactaatggcagcaggtgcggcaatggtcatgaccttctgcataaattgaccagtcacgcgttcgaagtttggttccaaagtcaggaagaaggaaggaatggcaaccccgatagcagaaaccggtgtgaggttaatcggtacaatcggataatcaagtggcaagaagacaaaaatagtggctaggatgactgaatacatcgttttgaccaaatacatggatgccacgcgttcaatgttgttgatgactcggcggccttcgtttagaacgccggtcatggcatcgaagtttgaatctaacaaaacgaaatccgcaatagagctggcagcatcggcaccagatgccattgcgatactgcagtcgctttgacgcaatgccaagacgtcattcacaccgtcaccagtcatggcgacggtgtgccccaaagcttgataggccatgattaaagatttcttctgttcaggtgtgacccggccaaaaacgttatagcgtttcacaagtgtttgataatctttggcggttgcgttgtctgcaatggtgctcatgtccacactttgatcagctccttcaaggcgagcttgcttggcaatgttggcgaccgtgatcggatcatcacctgagatgacttttaaagccaccccttgcgttttgaagaagtcgaacgtattaatggcagttggccgcaattcatccgtgatcaaaatcagaccgagcagttggggattaaccaacggatgcactaatttggttgctgtgccaatggctaaaacccggtagcccttagcagctgcatccttaatttgatttgcaatcggtgttggtaattgatcgccgaatgtgaactgcggggcgcccataaacaatacttgaccatcaacaacggcacccgaccacttacgcgcagaggagaagggcattgtctgcgtgacttgctgattggtatcgttttggaaggcggctttgatggccattgctgtttcgttgtcgtcatttagagcataaacaatagcggcggcggctttggtgactgtcgcttcagtttgcccaatcatcggcaatgtttcggcgactttaagtttgccactcgtgatagtaccggttttgtcaagacagatagtatcaactcgtgcgagtgcttcaatggccggcaaggcgcgaacgagaactcgtttaacggcaagattgcgggcggatacggctagtgccacatttgttagcaaaaccagaccttcaggaatcatgccgatcatggcggcactggttgttaaaatagcccgattatagttgcctcggcggatcatcgagacggtgaaaagaattgcgccaatcgggataagcacataagttaacacgcgaatgatgcgattgatcgttgccaacagttgacttttgctacctttttcggctttggctgccaaagcaagctttgccgcaaaagttgcggcgccaactgcggtgacctgcatggttgcctgaccggaaacgataaatgcgccagaaagcagcttgtcgcccacttttttagtgatgggtcgagactcaccagttaaaggactctcgtcactttcgagaccattcgttgcgacaaccacaccatcgacaggaatctgatcaccgcgtttcaggtgcaccatgtcatccataaccaattgttcaagctcgattttttgtgttttgccatcacgaatgacgatggctcgagcagctgccaaaattgacattttatcaatctggtgcttcgcctgaatttcttgaatggtcccgatcgctgtgttgatgatcgcgacaccgagaaagagtaagttcttataactgcccgttgtcacaatcaaagcacctaaaaccacgttcaccaagttaaataaggtgaacgtatttactttgataatttggctaattgatcgcgttaatggttttaacggcaagttatgttgacccgcggcaaaccgctcttcaacttgctttgttgataatccctgatccggcaaaatgttctgctcagccatcgcatgccctccaatacttttcattcattttaccaatcaatcccggtagatgacgaataagcgacctgtttttattaaactttgaagagtcttataagattgcgaagtggcttaatgttgttcatcaaccacgaaactcgcataatggaagacaaacgacaagaaagaagcggttgtatgccaaaacttaatccagacgggacgcaattcatcacgttatcgagtgggtaccatttgtggacacagacgcaagggaaaggtgatatccatctcatgaccttgcatggtggcccaggcggcaccaatgaagtctttgaaaattttgctgagcggctagcgccttatggtgtgcgcgtgacccgttatgatcagttggggtcattttactccgaccagccggatttctccgatccggcaaatcgtcagcagtttctgaacattgattactatctgagcgaagtggagcaggttcgacagcagcttgggattgaccacttttatctgcttggtcaatcgtggggcggtgtgctggcaattgaatatgcattgaaatatccagagcatcttaacggagtcattctgagttcgatgattgacaatcttgacgaatatattgtgaacatcaatcggattcgggaaactatgttttcaaaagaagatgtcgcttacatgcagcaaattgaacagcagcacgcgttcgatgatgcaaaatatcaggcgcttgtaagtgagctaggcgaacactacttgcatcatgcaaaagatccccagccgcgtcacttaatcagtacgctggccacgccagtttacaattattttcaaggcgacaatgaatttgtgatggtgggtgcgcttaaagattgggatcggcgtgcagatatccaccgtatcgccgtacccacctacctgacgttcggcggtcatgaaacgatgccgctggcagccgcggaacgcatggcgaagacaatcccagacgctaccttacatgtcacgccgaatgctggtcatggacaaatgctggataaccccactgactatttcagtcatttaggtgattggctggtcaaaaccgacacgaagacggcttttcattctaaataacgttataataagaatggtaaggtaagtttttcaaaatatggaggtgcttgcatgtctgaatatgatgaattaaaaacaagcttgttcgaacctgtacgagcgtttgatcgggcattggaacaacagccggatttaatcattccattggcagttgttcacttgattccaattgctctgacacttggtggcgggattgctatcattcggggtcaccagaaactgcgtgccgaaaaagagcgcacgaagcagttgagcttgaagctggagatgcataaacatcatcatggtcggcgtaattggcggctggcgccagaacatcgcggcgagcaggatgtttttgctccagaatatttggagaaaccggctggtaaaaatcgtcacgcccatcgtcggcattaggttgatttgatacatgaatagaccaaaagcctgagcaattatctattgctcaggattttttgcttaagtatgcgcagctttacgtgttgatttttcacctgtgaacatgtttatcgccgtgtccagagccgtatgtaaaaaaattttttgcccatttttttacatattactaaccacaaaaactgccgcgcacttttatgcgccgtcattgaaacgggcgacaagatgcgggacaatgggtgcacgataatttaggagatgatgttgatgccagttatgttgatgcgtactgctacccgagaagatattcccgcgatgatgaagattattgcttctgctcggcaatttttaggcgaacaaggtatttcacaatggcaaggaacctatcccgatcaggctgcggttgaacaagatgtagcgacaggcatcgggcgagttttggtcgttgatgggcaggttgccggcatagccgctttggtggaagggcctgatccgcattatctcaaaattgatggtgctggttggttggccgatgtgccctatttggcagttcatcgatttgcgcttgatggcagcattcgtggtcatcaattaagtaaagttttctttagtaatattatgagtgaagcctatcgacgcggtgtctatgacctgcgcgtggatacgcatgcccaaaatgtgatcatgcagcatgccatcaccggaatgggcttcgaatatcgcggcattgtttacatggatgaaccggttcctgaacgcaatgcttatgaggttcgtttggcacactaacagaaagacacgaaatggaggagatcgacatgcaggacattggcaacttggcactgatcttagtcacaacgcttgttttagcgcatttaagccgattgttgaatatgcccgctgtcattggggaattattggctggtattttgattggaccggcgttattgggctggttggcaccaagtcacacgatttcattatttgcggagattggtgtcattattttgatgtttcttgctggcttggaaagtgaccttgatttattaaaaaaatacttcaaaccaggcatgttggtcgccatgatcggcgtcattgtaccggtggctgttgtgttcgtttttggacgcagttggggcttcaacatgacaagcagtctattcttaggcattacctttgccgctacttctgtttcgatctctgttgaggttttaaaagagctacatgccctagaaggccgaaatggtgcgaccattctcggtgcggcggtggttgatgatattctcactgtcctcattttaagtttcacggtagcagtccttggtgagcaaaagaccgcgagtttgcctttctgggtgcaaatcattgaacagttgctctactttgtcggcatttatttggttgtcaggtgggctgcgccatacttaatgggtttggcagaaaaaatgtttccgtcgtcggctgtgaccattatgtctctgctcatttgcctcggtatggcctatctggctgatcttgtaggaatgtccgccgttatcggcgctttcttcgctggcgtggcagtaggccagacacgtcatcgccatgaagtggatggtagtttgagtgcgattgggtatgccgtgtttattccggtgttctttgtcagtgtcggcttgaatatgcggtttgatacctttggccgcgatctagggtttattgcgattttgaccttattagccttagtcacaaaatgggtcggctgtggggttggtgatcgtttggccggtgcgagttggctacagagtaatgtcgtgggtgccggcatggtttctcgtggcgagatggcattgattgtcgcccaaattgggttcgaggccaaactcatggacgctgaatattactcggcggttattgttgtgattgtcctgacgacattgattgccccaattatcttgaaagatgcgctacggcgtgaacaggaacctgtataataaagatgcgcgtctatttaacgcgacataaagccgagcgtgcgtgcgagttcttaaaaatgtgttgactgggcaatcattgcgggactggcggccgcgtttatgagggggattcaaatggctaatttgttttttgactttgatggcaccgttgctgattcggaagtcggtatcgttgcaggattaaaatatatggttcaggatcgcggattgcggccgctggacaattcggcctacacgcaatttatcggaccagcgctgattgatatgcttcccaaggtttggccagaacttgatgacattgaagttaagcgggccattgatgctttccatcattattacgaagaggaaggcctttatcaggttgaattgtatcctaattttctggacacgatggcaaagctcaagcaacaagacaaccaactttacattgcctctgctaagccagaaacaatgctgcatcgccttgtaaagcacttttcgttggaccaatattttgctggtgcgtacggtgcaagtgacgatgaggaaacccgggtcacgaaaaccgatattttgacctatgcgctaaaagacagtcaagttgcgctcgatcaaagtgtcatgattggtgatcgggccaatgatatgattggtggcaaggccaatcatgttcaattgctgggtgtgacgtacggctttggttctgctaaagaactaaaagaagccggtgccaaagtcttagttgatcaacctgcagatattcctgcaggactggcgaagctagcaaagatcaacgcaaaatagtgccctaatcaagcttgattaaggaaccagacaaaaaagacgtgcctgtaaatggcacgtcttttttgtctggcacgagataccgaattattgattgtcctcagaagtttgttggggatgaatcagtttctcaccaatttcattgagcaagtcaacaaactgtttggctttgtcctcgccaagtgcagtaacccactgatcgaagcgatcagtagcagttttagtgatctccgcctcaacttgttttccaagcggcgttaatcgtagagtgttacgccgacggtcagctgcaaacttggtctgggtcacgtaattgagattgcgcagtacgcgcagttggcgggccacggccggtttcgtgacgcctcgtttggcgacaatggcagtcaggctaatatcgggatcatgggcaatatcagatagaatccgaaattgttcaaaactaagatggtattttgccatcggtgccgagattagctcattaatacttttgaatgttgaaaaataggcatccacatatgcctgtagcaaagattcatcagtcatctttcttcctccaaagtttatcttaacaaatcataccgcaactgtaacttgaaattattaaaagttgcggtacactttttagttatgtaaagggctttaactacttatggaggctattagtgtgcgaaaacataaaaaagcttggctgattgggctgttatcaatcttcggtgttctgcttatgggattagttggcgccagtctgtatttctaccaatatgcatttgtgccatcaaaaaaatcttttttgagtggtggcgaaagtcgaattgtcaaggacggtaaggcgtggcttaaaagcgttcataaggaaacgtggaccgaaaaggcggctggtgccgatttgaacctggttgccgactatgtgccagcggcgaaaccaacgaacaaaacggtggtggtcgctcacgggtacatgaacaccaaagaattcatggcgccgcaaatcaaaatgtttcatgatgcagggtttaatgttttggccccagatgatcgcggccatggacaatcgcaagggaactacatcgggtacggctggccagatcggctggattatttgaagtggatcaatcaaatcatcaagaaacagggccagcaaagtcaaatcgcgttgtatggcgtctccatgggcggcgcaacagtgatgtatctgagtggcgaaaaattgccatcccaagtcaaaagtattgtcgaagattgtggctataccagtattattgatgaactgacttatcaagccaaagcaatgttcaatctgcctaaatggccgctgattccgtcagtggcactgacagccacgatcaaagccggttataacgtatttgatgccagtgccatcaccgcgttgcacaaaaatacccgccccattttgtttattcacggcagcaaggataagtttgtaccaaccagcatggtgtatcaaaactaccgagcagccacaaaatcgaagaaggccttgtgggtcgttaaaggggcagggcacgcgaagagttttcctgatcatcagcaagcctacagcaagcgagttgttggctggtttaacgcaaactggtgaagcgcaacgttactgggcggcattggtggcagcaacccgctttaaaatcgcgtagattttctcagcatcacttggggttccgcgtaattcgtaatcggccaagaagggcgcatcgaattctttggcatagcgtttagccgtgagacagtattgttcgttaaagttacgattgccggaaccaatgatgccaatgcattgatcagcgttttcgccttctgccagatagtcacccatggcagtggtcatcaactccttgacgccgttatcaataccattaccgccgtcaagataagtcggcaccatgacaaaaaatggtttggtttcaccgtcactttgtgtggcatcagaaatttctttcagcacaattgttggattagcagcatcctgatcatgttgcgtttgtgcataggctgccaagcgatgggcaaaagcccgagtattgccagaaatagaaataaataaaacgtggataggttcagtcattgtgatggcctcttttcatgattgtgagcatggcacaagcctttgcagtcgcttgctttttgccgatatgccaaacgaagaacagctaaaaagagtcgcggtacagcagccaagtgcttgcaccacggctcttttttgcggcgttagaattcttgataaactgccggatcttgatccttgagccgaccatccggttttgtcagactgtcaatggcggccatttcttcgttcgttagtgtaaagtcaaacacatcaagattggtgcgttgacgggcaaggtgtgcggactttggaatcggtaagatctgatgttgcagatcccagcgtaagataacctgaccgacatttttaccgtgtgccgcagcaatctttttgatgcttggttcctgtaaaaccgcgccgcgacccaatggactccaagcaactgtttggatattgtgctctgcgtcatactcacgttgcgcttgttggttgaagtaaggatgcaactcaatttgattaacagctggcgtcacgtcggtttctttaattagccgatcaatatgctcaggcaaaaagtttgaaacgccaattgagcgaaccaatccaaaccgttgtgcctgaatcaaggcctgccaagcttccacgtaaagatcctctttaggatttggccagtgaattaaatagagatcgtaataatccaaaccagcacgataaagactttcttcgatggtatcgatggcttcttgataacgatgatgacgacctggcagttttgaagcaatcgttaactgactgcacggaatgccgctttggcgaacggcctcaccaacggcaccttcattttcgtagttaaaagcggcatccaacatgcgatagccgacattgacggctcccaccattgctcgaacgccagtagcaccattaagtttgtaggtgccaaaaccgattgctggtaggacgttgccgtcgtttaaggtgtaattcattcttgtgaacctcctttaagatgtgctcatagtcaaacaagacacagatgactagctgatgggattgaataagtgctcggaccaatcagttaagaaaccaaattcatcagttcaacagttcctatacgtcgctgcgtccgcttttttaagctgcacaacactatatatagtgtagtccaaacctagtcatgcatacaagcatcgacaaaccttcgtgtataataaagccaaaagatagcgcgcaaaccagtctagtttctgtgctggtaggagttttacgcgtttacaaagaggggattatcacgaaaacacaacaatggcgagccgtttcacgaagctggtttgcactattcacgatgattttttgggtattattatttgtcgaagcttttagtacagggatgatgctcacaattggctcaccagtgcggaccgaggcggttatcgtcaagagtaaaggcctagatcaattgacgcaaacgttgaatcagcagttgttaacagctgcagcgaaaagtggggcatcattggataaaagaacagtgctcgtcactacagatgatacccagagactggctaagaatatggtggcggccagttcactacatcagccacatgtttcgttgacgaccattgaagagagtgtcacaagtcgcttacaaacggcagcgactgtgcagcatcaaaattttgatcaaaaaaaagtactcgccagcttgaaaacaacgcttgagcgcgaaattaatttacacgtgatggcacaaggctggggattagtttatccattgctggttttgatgacgcaaacagctgtgattgtcgcggcgatcctgatggcctttgttttgctcattatgatcaaaaccgctcattcatggtggcgtttcttagcagtaactggtcgttcgacctatgtcatgggatatattggcggattcatggccatgtttgtcaccgcgaatcctttcttaggtgctgtcgtatcacgcattgcgattaatcaacaactgacacgtgatctgattctggcttactcgccattatggcagcgcgtcgcaggatggacgattatcatcggtttgcttgttgcgggtgtgagccactttttcccgcgcgctcaggctgaggacgatgacttattaacggctgaaaggagtgctttatgaaaataaaacgctgggttgttatcgtatttgcggcggttgtggttatcgctggagcgggttggtactggtatcaggaacaacccaccgatacaccgacgacagagaaaacgacgattggtcaaaccgcaacgctatacttgcatggctattcagggggtgctggctcgactaataccttgattcgacatgctgagcagtctggcgcaactaaggtgctcacggccactgtcgctaaaaatggtaaagttagctggcaaggaaatgcacggcatgtcagcaagccgattgttcaggtgatttttcaggataatgtcaatccggattacgccaagctagcgggttggttgacgaccattaatcgcgaactttatcaacgttacggcgttcgccaggtcaactttgtggcccattcgatgggcaatatggcagtgatgttctatgcaactcaaaactcagatcaccctaaattgccaaaaatgcgggcttacgtggcgattgctggccattttgacggtattatcggcatgggcgatgagcctcatcgtattaaacttgctccaaacggttatccgacgccgccggatgagaattatgccacgttagccagaatgcgcgatcgttttccaaaaaatgtaaaggttttgaatatttatggcgatgtggatgatggttcagactcagacggtcgtgtcgcaaacaattcatcgcgctcattgcagtacttagttgaagggcgcgccgccagttatcaagaaaaagaatttgttggcaaaaaagcgcagcatagtgcgcttcatgaaaatccgcaggtggctaaggcggttgataattttatttggtgagggcatgcgctagtttttgttagggtcgtacggcgtgacaacgactttgccactaagatagttggccatgtaaacgtcgccagtttcatagccttgctcctgtagctgtgctttcagccagtcttcatcatgatcaatggcatcaagtgcggcgggatcaatctggccatctagaatcaacgggtatttgatggtttcatcgcctttgaggatgacattaagctgaccattttgttctagataggcttgccgaacatcgcgaagatcgtttacgccagcagttcgtaatttgtaagccaaatcatttgccgaaagaccgacttgagtcgccgtctctacacgaattttgccatgctgcacgaccaataaaggctcgccgtcaatcagacgcttgatccaacggttatggttagttaagtatttcgaactgaaaacaatgagtgtccaaatcagcagtacgtttacaaattggagcaagccgatatcagtattgtaaatcaccccgccgataataccgccaaggacgtaattctgcatttgatcaacaatcgttgctggggcaaggttacctttgccggtgagcttgatttgggcaacgaacacaataaagcctagcaagagtttcattgccgtgatgaaatatggatctctaaaaagttgcatgacagcctcctacttagtcacaaagtttgcttgaggcacaatcaaggtggttttatctagctggtagctattgttgtccgcattgatcgtcaccgtaaacatggttttcgttgacttaccgatggtgacgagcatgccagtgtgaactgtgttgctgttagcatagacttgttgcacacccacctgtttttgcttggcaacactgcgcaacagtgtcgcgactgcctgtgaatcagtggttgcggtgcggctcgcttgcagatcacgaatttgaatgccgatggttaatagttcaatcaacgcaactaaaatcaatagatcgcgatatttgtttgtgtgtttgtggcgcaaaaaatagatgagataggcgacaatcacaacagctcctgccatgatgatgatgtaacggaaggtactttgccaagtagtttggcgagttaagacgctgtaagcataaaaagttgttcccatgagacacctccaaaaaagtaactaccaaaagcataccagaaacagaacatgacagaagttattcttgacagtttgattggcggtgttatgataatgccaacttagacagacagattgctttgcggagaagagtacctgaagcgcagatcacaagcgagcctgaacagtgaaagcaggcgatcagttaatcagggaagatgagctccaaacagcttttcagcggttcacgccactgaaacgggcgcacccgttaccatgccgggtatcaaaattggtaccgttgaggcattggcatcaaaaccagtgcgaataagggtggtaacgcgcaaagtcgccccttgatcagaaatggtcaaggggcggcttttttttgtgagcgcgagccagcccaaacccactttccaagccatcgtaagcaccgccccctcccaacattctttccgcaaaagccatcactgcgtctgtcgacgaaaaataaggaggaccaccatcatgacagaaaaagttcaaataaaagctcctttccgggccgatttagtcggcagcttgcttcggcctgaacgcttaaaagcggcgcatcaacaacttgcgatcggtgaaattaaacaagatcaggaactcaacattcaacacgcagccattgagcgtattgtcaaacgacaagttgaacttggtttcaaagctgtgacggatggtgagttctcccgccgttattggcatctagactttttatggggcttgaacggttttgaaaaagatgatagttggcagtatgaacacaacttcaaaggcggcattaacgcagcagctaatgtgcatcttgctgggaaagtcagcttcaatcctgatcacccattttttgccgcctttaagtatttgcagagcattgtgccagaaggggttctccccaaacagaccatcccgagtcctgcattgctctttcgtgaccatcgcagcgataactgggcaaaatattatgacagatttgatgattatttggctgacgttgtccaagcctatgtggatacgattcaacatttctatgatttaggtgcccgctatcttcaaattgacgatactaactgggcctacttgattcagaatctaaaagatactgaaaatgatcccaaggcgcatcagcggtttattgacctcgctaaattggcacaccgcgtgatcaaggcggttttggtgaaactgccagaagacttgaccgtgacgtcgcatatctgtcgcggcaatttccagtcgacattcctgttttccggcgggtatcaatatgtggcagattacatcggtgatttgccgtatgacggcttattcctagagtatgataatcagcgttcggggtcttttgaaccgttaacaaagttgtggcacggcgatactaataagcgcattgtcctaggcctgattacttcgaagtttcctgaattggaagatgaggatgccgttatcaagagaattaacgctgcgactgagtacgtaccgctgacgaatctggcgttgtccactcaatgcggttttgcttcaaccgaagaaggtaacaaggttactgaagatgaccagtgggcgaaactggctctggttcaaaaaattgccaagcgagtttgggcggatgcttagattgttttttcacttatgtttcggcttctgagcgctcctgctcgcgctcagatttttttaacagataccactgttgtgttatatgataaatgtgtcatcaaaactaaaagggagatttctatattatggcaaaagttgaaagtttcaccttggatcacacagctgttaaagcaccttatgttcggttgattacgacagagcatggtgcaaagggtgatgtaatttcaaactatgatttgcggttggtacaaccaaacacagcagccattgatacggctggcttgcacacgattgaacacttgctggcatcgttattgcgcgatcggatggacggcgttattgattgttcaccattcggctgccgcaccggtttccacttgattacttggggtgagcacagcacaaccgaagtggccaaggctttgaagtcaagcttagaggccattgccaatgacattacttgggatgacgtccctggtgttgacatcaagagttgtggcaattacaaggatcacagcctgttttcagcaaaggagtgggcgaagttaattttgagccgcggcatttcaaatgacccgtacacgcgtcaggttgtctgaggcttggtttcaatcccaccagctcaaaattgccgcataaaaatggcactgctacaactcgctaaatgagtttgacagtgccattttcatgttcgaaggattattgaaataagtggattagccattgcccgccataaatcaaactcatactgtaggcgaggatcgtgataggtttgcctaaaataatgatccaaaaaaactttttaaaggtcattttagttaacccggcaagcagacacaaaacgtcgtcaggagcaaccggtaaaatgatagcaagcgtgaaaaagcgatcaaagcgttgctgatttttggtatagccgatgtatttgttataggttttttcagagatcagataagtaagcagcggcttaccaaatcgccgagcaagatggaaattgataaacgagccaattgcaataccgatgtagttgtaaaaaaagcctgtccatgggccaaacaaaatcacgccagccgccgtactgacaccgccaggaatgatcgggatgacaacctgaatgacttgaatgagcataaaaaataaagcgccggctattccgaggcgagcaatgtaagcctgcagagcattgatgtttgaaagaatacctaagtcataccagtaaatggctactgctgctaataagataacaacaacgatggtggcaaaattaatcagacgacgcacattttttggattcatctatttttggcctcagaacagttcatcatcaggaaaacatctatgctacaatgaatcaagcataccaaacatacgtactgaatggagagcttatgtacgagtattttgaaggcattattcaggcggtgaccccggcttacatcgtcatcgatgtgcatggcatcgggttccgtctgctggtagccaatccttatcattttgaagctggcgagcaaaaacgtgtttatgtgcagctgatcattcgcgacaacgaccagacactttatggattcgaaggtgctgcggataagcgtacctttaaccagctattgacggtcacaggcattggcccgaagtcagcgttggccattttggcgaacgtgtctagcggcggcttggcgactgcgattgctcaagatgatgtgaagtttttgactaagtttcctgggatcggtaagaaaacagctgcccagattatccttgatctcaaaggtaaaatcacaacagatggacaaccagcggcagcagcgattgcaccagttgccagtgacgttgattcggaacttgcagatgcgttagcggcactcgtggcattgggctacccgcaacgcaccgttgatggtctcactgacacactgaaggcattcagtgccaagacaactgatgcctatttacgcgaaggcttgcggctattaagcggcaaggcttaggcttgattatactgaagctgaccgttgacgacaacggaagcggcttttgaatcacgataaaatttttcccgtgcttttaatagcatgttaactagagaggaagtgggcttttggcagacgcagacaaggatcgcttggtttctggcgacgttgacgattcgaatgaagcacagatcgaaaaaagtttacgtccccggatgctcgcgcagtatattggtcaggatcgcgtcaaacatcagttggaagtctatatcacggctgccaaacagcgcgaagagtcattggatcatgttctgctctatggaccgcctggtttgggaaaaacgacgttggctttggtgattgccaatgaactgggcgtcaatattcgcacgacatcagggcctgctatcgaaaaaccgggtgatttagtggcactgctgaatgaattgcatcccggtgatgtcttgttcattgatgaaattcaccgtctaccaaaaattgtcgaagaaatgctttattcagcgatggaagatttttatattgatattgtggttggtcaagggccaaccgcccaccctgtgcatttcccgcttcctcccttcaccttaattggggcgacaacgcgcgctggcatgctttccgctccgttacgtgatcgatttggcatcagtgaacatatggcgtattattctgctgatgacctcagtgagatcgtcaaacgatcagcaacaattttcgatatggcgattgatgctgaaggtgctcatgaaattgcccgacggtcgcggggaacaccgcgggttgctaatcggctgctcaaacgtatccgtgattttgccgaagttgcggggcagagtccagttgatatacaaatggttgaccatgcgcttgaccagctgcaagtcgatcagcaaggcttagaccaaattgatcgcaaactgttgatgttcatgattcgtgattacgaaggcggccccgttggactctcaacgattgccgctaacatcggcgaggaaatggcaacgattgaggaaatgtatgagccttatctgttacagatcgggtatttgaaacgaacgccgcgtggccgcatggtgacgccagccggatttgcacatatggggatgtcggctgagcaacattaggcaacatgctaaccgcgctggctcgcgctcaactataacgcgctccccagcgcagcaacctgcatgtaaggaccttggtcgcaatggtcaaaaagcgaccatcacgtccaagggcgcttacattccggttgctaaccgcgctggctcgcgctcaactataacgtgctcgcagtcgcagaagcctgcacataaggaccttgagtcaaaacgaccaagatcgggccattttgactcaagcccacttatgctccggcttctaagcgctcctgctcgcgctcagctataacgcgctccccagcgcagcaacctgcatgtaaggaccttggtcgcaatggtcaaaaagcgaccatcacgtccaaggccgcttacattccggttgctaaccgcgctggctcgcgctcactgattaaaatgaatggaagcgaatatggtgcaagagaacaaacgttatcacaaagtagaagacaaacattatcagctatcggatttcgattatgacctgccgcatgaattgattgcgcagacacctttgaaggaacgtgatgccagtcggctgttggtattaaattctgaaactggtgagatgcaagataagcatttttacgacattcttgattatttcaagccaggtgatgcgttggtcatgaatgatacgcgggtgatgccagcgcgattgtatggggttaagccagagactggtgcccatatggaagtgttattgcttaacaacacgtctggtgatgattgggaaaccttgatgaagcctgcgcgcaaggctccggttggcacggtgattgattttggcgatggcttactaaaggccagagttaccaaggaactcgaacatggcggtcgaatgattcactttgactatgacggcatctttatggaaatcctcgataagttaggcgagacgccattgccgccttacatcaaggaaaagcttgaagatccagaaatgtatcaaactgtttattctaaagagctaggctctgcagcggcaccaacagccggtcttcactggaccaaagacttgctgaaaaaagtgcaagaaaagggcgtcaagttggtttacttgacgttgcatgttggcttgggtactttccggccagtagttgaggaaaacatcgaagcacataaaatgcacagtgaattttatcggttgactccagaagcagcagcaactttgaatgatgttcgcgacaatggcggtcgaattattgctaccggtacgacatccattcgcaccctcgaggccatcggtaccaaatttgatggtgccatcaaggcagattcgggttggactgacatttttatcaagccagggtatcagtggaaggttgttgatgcgtttatcaccaacttccatttgccaaagtcaacgttagttatgctcgtggcagcgttcaccgggcgcgatacaattttaaatgcgtataagcatgcgatcgacgaaaaatatcgcttcttcagctttggcgatgcgatgttcatttactaatcacgaagctagtttctgctcactttagcgtgtttaccgacgcagcaacttattcgcgctcactaaaaaatcggcttgcatttaagcaagccgattttttaacggacgggatcacatcaacacataccaacagacatgtctcgatttttcttttaacgcatcgctgcgtggaacaacgtattcataggcgatcacaatggccgggtcaaaacccgggaagtgcgaaaactacggtaacggtgatcccgtccttaacttcattctaacagggaagatggtatgagaaaagcggaaagctcggactttcttgaaggttaagtcaatcatgatatgcatgcacttacttttaaataacaagtaactctgttaaactgacgtcacgagaaaatcaagcggcggtgctgcgagggcattgccatgaatgaggagaatgtatggaaccagcagttaagtatcgtctgattcatcaggacaagcatagcggtgcgcggttgggtgaattgatcacgccgcacggcacatttccaaccccaatgtttatgcctgttggcacacaggcgagcgtgaaaacaatggcgcctgaagaattggatacgatgggggccactgttatcttggcgaacacgtatcatctgtggttacggccggggccagaactgattgaagaagcgggcggtttgcacaagtttatgaactggcacaaaggtatcctgactgactcaggtggctttcaagtcttttcgctagccgacactagacatattactgaagaaggtgtcactttcaaaaatcatttgaatggtgccaagatgttcctgtccccagaaaaggcgatcgcaattgaaaacgcgttgggacctgacatcatgatgagtttggatgaatgtccgccgttttttgaaagctatgattatgttaaaaagagtgttgctcgaaccagtcgttgggctgaacgtggcttgcaggctcacaagaatcctgattggcaggcgctttttggtattgtgcaaggtgccggattcaaagacttgcgcgagcaaagtgctaaggatcttgttagcatggattttcctggttattcgattggtggcttgtctgttggtgaatcaaaagatgagatgaaccatgtccttgatttcactaccccgctgctgccggaaaacaaaccgcgctatttgatgggtgtcggctctgcggatgcgctgattgatggcgccttgcgtggcattgatatgtttgactgcgtcttaccaactcggattgcccgaaatggtacttgcatgaccagccgtggccggctcgtcattaaaaatgcgaaatatgcgcatgactttggaccgttggatcctaattgcgattgctacacgtgtcgtaactatagccgcgcctatattcgccatctgatccatgttggtgaagctttcggtattcggttgacgacctaccataatctctacttcttactgcacttgatgcagcaagtgcgtgaagcgattgccaatgatgatttgctggctttccgtgaagatttctttgaagcttacggatacaacaaggaaaaagcaaagaatttttagattatttggagtagaccgcctaattctgttacactgtttgttgacaaaataaaaataagaggtgcctaaattgaatggtaatatgacaatgatcattatgctgctgattttcgtgggcttcatgtattttggcatggttcgtccgcaaaagaaacaacagcaaaagcgtcaagaaatgttgaatcagcttaaaaaaggcgaccccatcatcacgatcggtgggttgcacggtgtcattgattcaatcgaccagcaagctgggacggttgtcattgattctgacggcatctatttgacctttaacttgagtgctgttcgcggcacagcaactcgtcctgcagcgcctgcaccagccgctaccgtgacaaaggctgaagaagcacataatactgatgaacaacgcgaagctaaaccagttgaagaggctgcaccaaaggctgacgatcaaaccgatgccaaaagtgatagcaaggcagaagacgacaaatagattcgtcatctgatagagaattcaatataggtgacgtaagggaaggtgtttagccttctctttttttgcgttttaagagcggattggcgcctatcacggggagatgtcaaaacaccgcgttcttttttgataaatgactttaaaagacctctaagtcagaaaaaagctgcaaatttgccttaatagttcaaaaaaatacaaagtgaaataagcaattaaagtcaatgaacacaacaatatcagtgagcaagtcgatttttcgtgaaaaaattcaccaaaattgtttacaaaatcacaaagaccggttatgatgttcttgtgaaatggttaacaaaaaattccgcaaaacacttggaggtaagctcatgttaaagaatactgcgaagactgctaccgaagttgatgttaagagtatggttgacgaattggttgcgaatgcgcatgccgctttgaagatcatgaaaactttcgatcaagaaaagatcgatcacatcgttcatcggatggcaatcgctggtttggatcatcatatggaattggcaaaactcgctgttgacgagacgggccgaggcgtgtgggaagataaagcgatcaagaacatgttcgccactgaagaaatttggcattcaatcaagaacaacaagaccgttggtgtgatcaatgaagacaagcaacgcggcttggtatcgattgctgaaccaattggtgttatcgctggtgtgaccccagtgacgaacccaacttcaacgaccatgttcaaatccgaaattgccattaaaacccgtaatccaatcattttcgccttccatccgggtgcccaaaagtcttcagcgcgtgcgttggaggtcatccgtgatgaagccgaaaaagcaggcttaccaaagggtgctttgcaatatatccctgtaccaagtatggatgcgactaaagctttgatggatcaccctggtatcgccacgattttggcaacgggcggtcctggcatggttaagtccgcctattcatcaggcaagccagcactgggtgttggggccgggaatgcgccagcttacattgaagccagcgctaacatcaaacaagctgtcaatgacttagtactttcaaagagttttgataatggcatgatctgtgcttccgaacaaggcgtgattattgattccagcatttacgatgatgtgaagaaggaatttgaagcccaaggtgcttacttcgttaaacagaaggacatgaagaagttcgaaagtaccgtcattaatcttgaaaagcaaagtgtcaatccgcgaatcgttggtcaaagtcctaagcagattgctgaatgggcggggatcacgattcctgataacaccacgattctgattgctgaattgaaaggtgttggcgaaaagtatccactgtctcgtgaaaaactaagtccagtactggccatggtcaaagcagatggtcatgaagatgccttcaagaaatgtgaaaccatgcttgatatcggcggtttgggtcatacggcagtcattcacacggctgatgatgagttagctttgaagtatgccgatgctatgcaagcttgccggattttgatcaacacaccatcttctgtcggcgggattggcgatctttacaacgaaatgattccaagtttgacactgggctgcggctcatacggtggtaactcaatttcgcataacgtggggacggtcgacttgcttaacatcaagacaatggcaaaacgccgcaataacatgcagtggatgaaattgccaccaaagatctattttgaaaagaattctgttcgttacctcgaacacatggaaggcatcaaacgggccttcatcgttgctgatcgaagcatggaaaagttaggcttcgtcaagatcgttgaagatgttctggctcggcgtgaaaatcctgttcaagttcagacttttgtcgatgttgaacctgatccatcaactgacacggtcttcaaggggaccgatatcatgcgctcatttggaccggataccgtcattgctatcggcggcgggtctgttatggatgctgccaaagggatgtgcttgttcaacgatgccggggatgctgatttcttcggcgctaagcagaaattcttggatatccggaagcggacttacaccttcccgaatctgaataagacaaagcttgtctgcattccaacaacttctgggactggttcagaagtaacaccttttgcggttatcaccgattccaaggctggcatcaagtatccgttagctgactatgcattgacgccagacatcgcgattgtggacagtcagttcatcgaatccgtaccgccagtggttgtcgctgattccggtttggatgtgctctgccacgcaaccgaaagttatgtttcaaccatggccactcattacactaagggcctgagtttggaagcaatcaagttggtcttcgaaaatctggaaaagagttatcatggcgacgtcgaagcaaagtcaaagatgcatgacgcttcaaccattgctgggatggcctttgccaacgcactgttgggcattaaccacagcattgcgcataagattgggcaagcgttccatctgcctcacggtcgttgcatcgcgatcacgatgccacatgttattcgcttcaatgcgagtcaaccgaagaagcgcgctatctgggcgaagtatagctacttccgcgctaacgaagactacgcagaaatcgctcgctacctcggccttcctggcaagacaactgatgaattggttgaaagctatgttcaggccttcatcaagctggctcacagtgttggcgtcaagctcagtttgaaggaacaaggcgttaaaaaggctgatctcgacaagcaagttgatcgtcttgccgaactggcttatgaagataactgcaccgttaccaacccgcaggaaccgttaatcggcgacttgaagcatatcatccttgatgaatatgaaggcaccgaatccactttctaagatgtttgctgctaatcatttcacaatgatcggcgcagagaattcaatggcgacattatttgagccgatcacgaaaaacacgtcagtaaattggcgtgtttttttgtgtgactcatggcataatggagtacagtgactgcaaattaaaagtaaggatgtaaaatgacaccgaataaagaggattatcttaaattgatttttgagattggcggcgatacacagctggtctctaataaacaaatcgttgccggtatgcatgtttctgctgcttcggtcagtgagatgatcaacaaactgggcgaagaaaaactggttgcgcacacgccttatcaaggtatccagctgacatcagctggccggaaaaaggcggccattttggtgcgtaatcatcggctctgggaagtgtttctggttcagtgccttaaatatccagctgatgcggtccatcaagaagcagaaaaactggaacatgccttaacgccggaaatggccaaacggttgtcagccatgttgggcgaacctcgctattgtccgcacggcggtgttattccggatgccaatggccactatctccaacaaagtcgggtgacattaggcacgttagatgttgggcaaagtgggcatattgaacgcgtgattgatgaagtttcgttgattgattacacggttaaaattgacctgcggctggatgatgaattcacggtgactgcgaaaaccttagatgccgtgatcatcaagttagcccgtaccggaaaagaattggcggtcgatgcagatcgtgctgatcacatttttgtcgaattgtaattaagtctagagaaagcagggtcgtatacatgccagaagagtcacgtgctgtgattattatttttggaggttcaggagatctagcctcacgcaagttgtatcccgcactgtttaatctttaccgtcgtggtgtcctcgctgagcattttgcggtgatcggcacagcgcggcgtccgtggactgatgatcattatcacgaggttgttgaaaacgccgtcgctggcgatgatgtggatcgtgaccaagcaaaagcctttgcccagcatttcttttatcagagtcatgatgtaaccgatgcagatcattacattaccttgaaaaatcttgctgcaaaattggacgatcagtatgtgactggtggcaatcgcatcttttacatggccatggcaccagatttcttcgaaacaattgcgagccatctgaaatcggaacatttgctgacggagcgcggtttcaaccgattaattatcgaaaaaccgtttggtcatgattatgccagtgctaaagaactaaacgattcgttaactgcaaccttcgatgatgatcagattttccgaattgaccattatcttggcaaagaaatgattcagaatctgttggcttttcggtttgataatgccatttttgaaggagtctggaacaaggattacatcgacaatattcaaatcacactttccgaggcggtcggggttgaggaacgcgctggttattatgaaaaggccggcgcgttgcgtgatatggtgcaaaaccatgtgatgcaggtgctgtcttatctgacaatgccaaaaccaaagacttttacggctaacgacattttgacggccaaggatcaagtgtttgccgctttgaagccttatgatcttgcaactgctaaagaaaattttgtgcgtgcgcaatatgcaagcgccgaagtagatggcgaccaagtgctgggttatcggcaagaagaaggcgtggcagcaaattcacaaacagccacttttgtcgcaggcaaaattatgttagatatgccgcaatgggagggtgtgccggtttatattcgcactggtaaacggttaactcggaagtcaacccagctgacactgacatttaaaccggtcgcaagtccgttattcaaccgagaaaccggaagtcaaccagacagcttgaccatttatatcgagccaagtgaaggctattcgttgcaattgaatggtaaggcccttggcacaggctttaatattgaacccgatgagttgcggtatcgtcatgatccggaagccgccgctgctgctccagaagcatatgaacgattaatcaataatgtgcttgaaggcgatcagacaaactttactcattggtcagagttatcggcatcttggcggttcatcgatgcgattcaagcagcttggtcacaggaaacagaaatgccgacatatccggctgccacgatgggtccgcaagcagcgtttgatttgttagctcgtgatggccgccaatggttctggcaaccacgccgaattaaactggcggactaggctttcacagataaacaaaagggactgtgacccgaaaaggcggtcagggtcctttttttagtgaacgcgagtcagcccgggtttctgggctgacgagcgcgttataggtggtccgagtagaatcggtcttgatcgttaaagctgaacgtgaactagcgcgacagaaagaataacagaacagttgatacgaggaaggggaagctcatggcgttatttgaattaccattacaaaacgatacttcccggaaaatcattcatctggatatggacgccttttatgcttcaattgagatgcgcgataatccgcaattgcgtagtaaagccttggtaattgcccgggatccgcgtacaactggcggcaaaggtgttgtgacaacggccaactatgtcgccagacgttatggcgttcattcggcaatgccggccaacgaagccttgcaacttgtgcctcgttcaaaactagtgtttaagacgccggattttccaaaatataaagcagtgtccgcgcaaattcacgccttgtttcatcaagtgaccgatctaattgaaccagtggcgttcgatgaagcttatcttgatgtcacggccaacaagatgttcccgagtacgatcgccttggcattgtggctgcaagatcaaattagtcaggcaacgcagctcacaagttccattggcatttcctacaataaatttatcgccaagcaagcctctgattacaataaaccggttggtcgtacactggttttgccagaacaagccttattatttttggatcggctgccgatcaagcagtttcgcggggttggtaagaaaacgttgccgaagttaaccgacttaggtgtcactgatggcaagtctttacgggccttatcgcaagatgatttgatccggatgtttggcaaaatgggatttgtgctttatcaacatgctcgtggcgttgacaatcgtcctgttgctgttcggacggcgaagtcaattggcaaagaacgaacctatggcacgcctctaactgacgccgaggcggttcagacacagttacacaatctggcagggatggtcgtgacatcgttgaatcaaaaagctatgcacggcaaaaccgtggtgcttaaggtgcgcgatgtggacttcatcacgcaaacaaagcggctaacccaagatcactacttcgaaggcgaacaagccattttcgatgcagcgtggcagctctggggcagtgttgccatgtcgaacttggccatccggttacttgggattaccgtgaccgggttggatccgaagcagtatgagaatttggacttaccgttgtgaagacagacagcgaaggggtgcttgctgtaggggctcaagtagcggcatgcgctacttgagctaattaatgcggtttagcgcacgtttttcccataacgcgctcgccaacccagaaaccgggttggctcgcgcttcgtctgtcatagtacagccgtaacctatggtatactaacgatagattgcagtggggtgatggtatggcgacaaagcatgagcagattttggattatatcgcaaacttggcggttggcaagaagatttccgttcggtcaatcgcgaagcatttgaaagtcagcgaaggaaccgcttatcgagctattaaggaagccgagaataccggctttgtctcgacaattgcgcgtgtcggcacgattcggattgaacaaaaaccgttaaatccaattgaatctgtgacattcaaaacactggttgatttgattgacgccaaagttttaggcgggcaggccggtatggacaagaaattggacaaattcgtgatcggggcgatgacaccagctgccatgcggccttacatcacgcgtaactcgttgatgattgtcggaaaccgtgaagatgcacaacggctggcactagaagatggtgctgcggtgttgatcaccgggggattcgaaactagtgcggcgattatcgccttggcggatgatcagcagttgcctgtgttgcaaactgcttatgatacctttacagttgcaaccatgatcaatcgagctttgtcagatcaggcgatcaaacaggatattttgacagtagctgccatttatacgccgttggcccaaattcaaaccattggtgttgaggcgacggtcggtgattatttgctgttgcccgatccgcgatatccattgccggtcgtgacgcgcaatgggcgattggttggcgtcatgcggccatcgctggttggcggtaagaagccgacggtgccgattgaacggttgatgcagaaggatccgcaaactgtcaaaccttaccttagtgtgactgctgtggggcataccatgcaggataacggtttaacggccatgccggtggtggatgatagctggaatctgttgggaattgtgacccgcaacgcggttttttcaagtctcacaggcattgcccacagtcgcgaactatccaataccattgccgatcaggtcagcgctcaactgaccgccatcacaccgcaaccgccttacgttggcggttacgagttgaaaaccgtgccggccatgaccaattcgcttggcactatgagttttggggtgctggctgaagccattaacggttgcactacccgttatttgcatgacacggggcggcgaaacgtgttggtcgaaggactgaatttaacaacatttcgacccatccagttagaaagtgtggtcaccgtcttgttacgtgaacttgagatgactaggcatgatgcgacgctggatgttgatgtcttaagcgacggggttcaggttgctaaagcgattgtgacctgccagctattagaaaggaattgatttttgatgattcaaaccgatattattaacgccatcaaggcaaacgatccaatcattatccatcgtcatgtgaacccagatccagatgcgttgggttcccaagttggcttagcagaaaccattcgcgctagttttccggataagaaagtgtatcaggttggtagtgacactggcaatttgagctggttggcacaggaacaaaccattactgatgacgtttacaaggatgctctcgtgattgtgaccgatactgccgatacgccgcgagtttctgatgagcgcttcaacaaggggaaaatgctgatcaaaatcgatcatcatccgaacgatgatgcgtatggcgatcttgtttgggtcgataacaacgctagctctgcctctgaattgatttacgatttaatcgccgccagcaacggtgttttgaaactcagcgataaggctgctcgcctaatgtacgctgggattgttggcgacaccggccgatttttatttaacaatacgaccccgcatacgttgcaggtcgcggctgagttgattaaaaaggattttgatccaacagccattaataatcggatgaacacggtgacgttggcacaagcacggttgcaaggctatgttgtcgatcatctgaaaattaccccagcaggtgccgccagtgtgacggtaccacggaccgcgatcaacgagctgaaactggctgatgatcaggtaagcgctgttgtcggcacacccggccgactggataccgtcattgcttgggcagaatttattgaacaggcagaaggcggttaccgcgttcatctgcgttcaaaaggtcccatcatcaacacacttgccaaagcacacaatggcggtggtcatccattagcaagcggcgctaaggcagctaattttgacgaactgattcaaatcgagacgcaactcgatcaactggtcaaagaatattcgacctcaggaaagtaggcattatggagaatcaattcaaacaatttcaactaaaaccttttgttatcgatggtctcaatgcaatggccatcaccgccccgacacccattcaacaaaaagttattccggcgcttttgcgtggtgaaaacattgttggacaaagccagaccggtagcgggaaaactcacgcctttttggtacccttactcagtatggtagatcctaccgaagatgcgactcaggtcgtgatcactgccccttcacgtgagttagccaatcaaatttatgcggttgcccagcaactcatacaaactgagcccgcgattcggattaaccgtttagtcgggggaatggacaagcaaaagcagatcgacaagttgcaaaatcatcaaccacatgtggctatcggaacgccaggtcgaatcttggacatgatcaaaggctatgatttagtgccatcgtctgtccgtcattttgtagtcgacgaagctgacatgacgctggatatgggcttcctcgaaacggttgatgcgattgcctcgagttttccagatcatctgcaaatggctgttttttcggcgactattccgcaaaaactggaaccattcttgcgcaagtacatggacaatccaacgacgattgaattgaaaccgcagtcggtgattgctgacacggttgaaaacattttgattgcggcaaaagggcgcgataaaaatgagttaatctatcagcttgtcacgatggggcatccctttttagtgctgatttttgctaacaccaaaaccagcgtggatgctatccatgacttcttgaagcatcaaggtttgaaggtggctaagattcatggtggcattcagccgcgagaacgtcggcgcgtgatgaaggatgttgccgacctcaaatatcagtatgtggtcgccactgatcttgctgctcggggtatcgatatcaagggggtctcaatggtcatcaatgccgagattccgcgcgacaacgagttctttattcaccgagtgggccgaaccggtcggaatggcatggctggtacagcggtgacactgtacgaaccgggacaggaagatcaaattgccgaattagagcatatgggcattaagtttgcgccgaaaatgatcaaaaacggtgagcttgtcgacacttatgaccgcaatcgtcgagttcaccgcaaaccgaagcaagaagacaccagtcttgccattcgcggtttggtgaaaaaggcaaagcaaaagcacatgccgaattatcgtaaaaagattcgaactgcggtgttattagaacgcaaacgaaataccaaaattgctcggcgccaagcgctgttagcagaaaaacgcaagaaccgcaaacgagggtgagcatatggcagtcaacgacctgaccctgccgacctggaacacgctggatgaagcgcggcagaagtttatttttcagcaactcacacgatactttctaagtccgttattgtccgttgacgatattcggccgttgacggtgactttttttggccaaactttgcatacgttcgaggcaatgattggcggggaatggttacggttggtcccggggatgcctaatgttagcttaggttttgcggctgatcaacaagggcagttagctgattatttggggcaaagcggactaaccatgcaagacctgagccatcagctttcgcctgaacgacaagttgatataccagcgatgctcgtggcaacgagagcaatgccagcgggcgaagagattttaggccgagtcagtttaacgacacgtatttttaagggcaatcatatggcctacgcggctgttcgtgctcaagtgctggccttgctggaccgccatggcagtcttgatccgttttctcaatccggctggccagcaactttgactagcggatcggtgatcctgcgacttgccagtgcgcaccattatcaggtcagcatcagcaaaaactggcaaaaatctgagctgcaaaaagcacttagttacttcggcttccgcctgccaacccaagatcaatatgaatacttgcaaggcgggggtgtcaccagcctattttcattcggcaataccctgccagccgacatgccacgctaccttcccaatcgcttcggcctaactgttccggttacgcgatccggcagcgagctaatccaagaagcgatgcaaaaaagcacaccactatccgcgcaaccaaccgcaaaagaagctttggcactgtcgccgttttatcagttggcaggcgaagggaacatgggcacggctttatatcggcgcgtggcgacaattacgatggattgagaatctgtactcgttggcgtttgaatgcgcgctaaacaatcaggatgagacaataatcaacaacaagttgaccctttttttcagaaaagctataatgagttttcgttaggacatgcgttgaaccctgcacgagacagaaacgaccgcacagctgagaacggtcgcgtcaggctaagatgtgctccctgatattagttaaacgacaattaatgaagtggtaatgactcgcatcattgcaaccaaggtggtaccgcgtgcaagcgcccttggcagcaatggtgctttttattttgtgagcgcgagcaggagcgtttagaagccggagcataagcgggcttgaccccaaatggcctgggcctggccatttggggtcaaggtccttatgtgcaggcttctgcgacggcgagcgcgttataacggacaccaaacaaggaggaactttttgatgaaaaaaatgtccagtggtgaaattcgccaaatgtttctggatttctttaagagcaagggccatgcagtcgaaccgagtgcatcacttattcccgttgatgatccaactctgctttggattaattccggcgtggcaaccctgaaaaaatattttgacggatcagtagtgcctgacaatccccggatcaccaatgcccaaaaatcaattcggacgaacgatattgaaaatgtcggcaaaactgctcgtcatttgacgttctttgaaatgcttggcaacttttctgttggcgactacttcaaaaaagaagtcattccttgggcgtgggaactgctcacgagtccaaaatggtttggatttgatcctaaacggttatacgtcaccgtctatccaaaagataaggtcacgaaagaactttggcagaaaactggggtgcctgacgatcatattgtggaggcggaagacaatttctgggatatcggtgaaggtccttctggtcccgattccgaaattttctatgatcgtggccaacaattcaataatgtggctgaagatgatccagaaaattatcctggtggcgaaaattcgcgttatgtcgaaatctggaacatcgtcttttctgagttgaatcatttgccagatggccgatttgtggaacaaccgcataagaacattgatactggcatgggtttggagcgactggtggcggttattcaaggcacacccacgatttttgaaaccgatttgttcatgccaatcatcaaagcaaccgagaaaatgagtgctggcaagcgctatggtgtcagtgcgcaggatgatgtctcttttaaaatcattgccgaccatgcgcgaacagtgacctttgcgatcggcgatggcgccttaccaagcaatgaaggccgcggctatgttttacgtcgattaattcgtcgggcggttctgaatggtaaaaagctgggcattgatcatgattttctatatcaattagtgccggttgttggtgagatcatgaagagttattacccacagattctggccaaccagcagtttattcaaaaggtcattgaatctgaagaagcacgcttccgccagactttggacgccggcgtgaccttgctcaatcagatcattgctgacttgaaacaagacggtaagaaagaaattcctggagcagatgcgtttaaactctttgacacctatggcttcccagttgaaatgaccaacgaatatgctcaagatgaaggtttgcaagtcgacatggctggcttcaagaaaaacatggctgcgcagcgtgatcgggcccgcaaagcgcgcggtgatcgacagtccatgggcagtcaagataaagtgctgatgagcatcactacgccaagcaaatttactggctggaccgaattggatcataagcacgcctccttgcagaccattgtggtgaatgatcaactgcaagatagtgtcagtgaaggtaccgcccaactgatttttgacgagaccccattctatgctgaaatgggtggccaagtggcggaccacggcgaaatcaaggcccaagacggcacggtgttagctgacgtgagcgatgtgcagcatgcgccaaatggccaaaatctgcacaccgttacggtgaagggcaaactggaaagaggccagcaatactggctaagtgttgatccgttgcgccgtaagaaagtatcactcaatcacacggcaactcacttgctggaccaagctttgcgtgatgttctgggtgagcacacacatcaggctggctctttggttgaaccggattacttgcgtttcgactttacgaattttggtcaagtaacgcctaagcaactacgccaagttgaaacgattgtgaaccagaaaatttgggacgctttaccgattacttggaaagaaatgccaattgaagaggccaaaaaacttggtgcgattgcgatgtttggcgacaaatatggttctgtcgtgcggattgtcaagattggcgattacaacaccgaattcgatggcgggactcatccaaccaactccaatgcactcggcttattcaagattacaagtgagtctgggattggcgccgggattcgtcgggtcgaagcggtcacgtcaaaagaagcttacgaatatttgacccagcaacaggattggttgagcgaaactgctgagaatctaaagattgaccaagtcaaaaatgttccaagcaaagtgacccaattacaggcggatttaaaagccgaacaaaagacagtggctggcttacaggccaagttggcagcccaagcggcggcaggtatttttgatcatcctgaggaagtcggcggtttgaaactgattgccaaacaggttcaggtggcaggaatgaatgaactccgacagttggcggataaatggaaagccaagcaggcatctgacattttggtactgggtaccgaagttagcggcaaggccaacttgttggttgctgtcaatgacacggctaaccaagcaggctttaaagcgggcgatttgatcaaggccattgcaccaaaagttggcggcggtggcggtggtcgtccagacatggcgcaggctggcggcaagaacccagctggcattcctgcggcgttgtctgaagcaaagacagtgattagccaaaaggcttagctgattaggccagatggtcaccatcgataatgaagcggcaagtttttggaaatttcgaaaacttgccgcttttacttgaccttttttctgagattggtgaagtcaatcacgcaaagttgagcggtcatgttaaacttaagaaaacgatttcatcgaggcggggagtatgaataggttgcggttgtcgttgactggcttttttggaccaaatgaacactatctggttgccgaacaacatgatggcatcaaaatcatatattcagttgatccgcgtgtttcaacacctatttttttacggaccattgcacaaaatcaaataggccattaaattagtcgataacgacgattggtagccgcgcagaacaaaaaatagcatttattcacttactattgctcaggaattgtacatttgcttgtatttcaagtaaaatggtctgtgaagcggatagaatagaggtgtaagaatgagcacattagatcaaaccgttcattttgattttcgagataacaatccgaagaatgttcacgaaacgctggagacagtttacaaggctcttgaagaaaaggggtataatccgatcaaccagattgtggggtatctgatttctggggacccggcctatattccacggtacaatgatgcgcgtaatctaatccggaaacatgagcgcgatgagatcattgaagagcttgttcgaaactatcttggcaaggagcaagcttaatgcgcttgatggggttggacgtcggttcccgaaccgttggggtcgcggtcagtgatcctttgggctggacagctcaaggtttggaaattattcggatcaacgaagacaaggagcagttcggcatcgcccgcctcaaggagcttgtgaagcaatatgaggtaacggcgtttgtattggggttgcctaaaaacatgaacaactcgattggaccgcgtgcggaaaagtcacaagcttacggtgaactgttgaaaacaacgtttgggttgccagttgatttcattgacgagcgactcacaacagttgaggcttcccgcatgttgattgaagaagctgatgccagtcgcaaacggcaaaagcaggtgatcgataaattagctgctcagatgattctccagaattatctggatgcaaaaggtcccttgaccaagcaataatcagggtaagtgatggcatgacctccgcccgtgttgaaggagaaacaagatggcaaataatgaacatgtaacgcccggcgaagacgatcagcagattacgctgattgacgaaaaaggcaatgaagaattgtatcaggtcttgttcacatttgattcggaagattatggcaagagttacgtattgctgtatccggcgagtgaaagtgacgatcaggaagtcgaaattcaggctttctcatttacccccgacgaaaatggtgatgccagctcgggcgatcttttcccgattgaagacgatgctgaatgggatatggttgaggaagttttgaacactttcttggccgacgacgattcgaatctgaaagattaagtcttaactcacggcatgtaagaccaccagaatattggtggtctttttgtagagtgcgagccagaccggttagaaaccggagtgtaagcggacctgaacgtgatggccgggctttggccattgcgctcagggtccttacacgcaggtttatgggctggcgagcgcgtttacgagcgaagcgtaaattgccagcagcctaaaaagggagttaaagccggcccggttttgaactggcgagcatatgaaccccacttaatattcgctggcaaaacagataaattgagctgtgtcgcaatcaaccccttaccctacttgccggctatggtagaatacactttgagagagtggaggcattcacgcaatgagcgaagaaaagcgtcgttttaaagccgtgatcggtgataaaacgtacacgattatcggaccagggtccgaacaacattttataacggtcacgaagttgctgaatgaacggctggcgcaagttaaaacacttgcgccagatctatcggccgaggaacaagccattttagttgccttcaattctgtttccgatcaggtcaaactgttggcggcgcaacaggatgatcatgagcaggaagagtagtgggggaccgtgttgatttcattatcgattattttaattttggcttatttctattatagcggcgcgcgtcgtggtgcggcgttgcagtggttgcatgtggccggttatgggttgagctttcttgctgcaactgcacttgctcggccactgggggcgcattttactttggtagtgccttacccgtctgctacgaatgccggtcagtttgcattttattcagataaagtcggcttgacgcttgataccgcattttatcgcggctttgcttttttagtcgtgctgacgtttggctggttattaactcgagtaggggcattgtggtttcacgacttgacatatgccgcaatgggtcatcgacgcagtgccattattggcggctgtgctaatttagtgattggttacatttttctgtttttgattttagccttgctggcattgattccgattgccggtattcaacatggcttagaccatgccatcgttgccaaggtcatgatcaaatattcgccagggctaacacaatttgtgaatgctttatggctatgaatgttgacgacgctcagggacgatttatcacgtctttgagcgcttcttggttataggagcaattatttatgaatgaaaagattttaaaaacccttgaatacgacaagattcagcaagcattgttgggtcaggtcgtgacagcaaatggccgccggctggtgcaggccatgcagccgctgaccgatccagtcgccgtacaacaggcactagatgaaaccgcagacggcgcatcggcgttgcgattaaaaggcggtattccggtgccgcaactcgagaatattgatccggcgcttaaacgagtcgacattggggccgttttgaatggtcaagaactagccagcatcagccgtgtcttgcaaacggtgagtgccattgataaatttttgactgatttacaggatcagattgattttcgccagctttacacacttcaagaatcgttaaccgtgttaccgcaattatcacggcgcttgaagacagccgttgatcctgatgggacattgaccgatgaggctagtcctcagctgcatggtgttcgtgaacagatcaaaagtattgaaggcgagatccgcggtaaaatgacaaattatactcgcggcgcccaatcaaagtatttaagtgacccgattgtgacgattcgggatgatcggtacgtgattccggttaaggctgagtatcgcgccaaatttggcggtgttgtccatgatcaaagtgcgaccggccaaaccttgtttattgaaccgcaagcaattgtcgctttgaataatcgactgcgtgaggcacaactggccgaggtagctgagattaaccgcatcttagccgaattgtctaatgaattagcgccttataccggtcaaatcaaggcgaatgcggcggttcttgggcattttgacttcatcaatgcgaaggcgagattagccaaggcggaaaaagcgacagagccgttagtgtcggctgataatgacgtattgttgcgtgatgctcggcaccccttgatcgatccgcataaggtggttggcaacgatattccgttgggcgacaagtaccaagctatggttatcaccggcccgaataccggtgggaaaacaatcaccctcaaaacattaggactgttgcagttgatggggcagtccggattgtttattccagctgatgatgaaagtcgtatcggcattttcgatgaagtctttgcagatattggcgatgaacaatccattgagcaaaatttgtcgactttttctgcacatatggacaatattgttcatattctcaaacaattgtcacagaatagtttagtgctgtttgatgaacttggcgccggcactgatccgcaagaaggtgcggcgctggcaatcgcgatcttggacgcagtgggtgaagttggcgcgtatgtagttgccacgacccattatccggaattgaagttatatgggtacaatacagcaaagacgattaacgcatcgatggaatttgacagcaaaacgctgcagccgacttatcgccttttggtcggggtacctgggcgctcaaatgcgtttgatatttctgcacgtttggggctgccgagcgtcatcgttgagcgtgctaagtcaatgatcagctcggacagccatgagctgaataatatgatcagcgacttggaaaaacagcgaaaggcagcggaaaccgcttatgaagccgctcgtcgtcaacttgccgatgcacagtctgtccatgacgagctagcggcagcctacaagaagttcacaacggaacgcgatgcccagttgcagcaggctaaggacaaggccaacacgttggttgacaaggcccaaacgaaggccgataaaatcatcaagcaactgcgccaaatgcaattgacgaatccgggaaccgtgaaagagaatcaattgattgctgccaaaacggcgcttaaacaattgcatcaagacgagccgcttcagaaaaatcgcatcttgcgccgggaacgtgagaaacaggcattgcatgttggggatgaggttaaagtggcaagttacgatcaaactggtaccttgctggagcaattcgataagaagcattggcaggttcaactaggcattttgaaaatgaaggtaccaactgatgagctggaaaaaatcaagccaagtaagcaatcagcggcgcaacggccggttgtcaaagtaagtggcggcgggatgagcggcccatcgaccacgctggatttgcgcggcgagcggtatgatcaggcgatggcggatttggatcaatacattgatgccgccttattggccggttatccatctgtgacgattattcacggactgggcactggcgcgattcgcaacggggtgacccagtatcttaaacgcaatcggcaggttaaaacgtatggctttgcaccacaaaatgccggtggttcaggagctaccatcgtaaactttaagtagcaggtagttttttacacttcattgtgctatgatttagttacaaaaagtaagaggagggatccgttcatggttcaagcagtaacagattcaaactacaagacggagaccgacactggcgtcaccctaacagatttttgggcgacttggtgcggcccttgccggatgcagagtccggtcatcgacaaattggcagaaagtcgcgatgacgttaaattcgtgaaaatggacgtcgacgccaatccagagacaccaaagtcttttggcattatggccattccaaccttggtcatcaaaaaagatggcgaggttgttgagaagcttgttggctatcaaaccaaggatcagttggagtcaaccttgaacaaatatacggcttaatgaataagtgaacagacacgcatcgacgctactggtcgatgcgtgtttttttgcactaaaacatgttgaatgggatgtcgcttaagatgaagctgacaggcgttaatttcaaaacttaaaatattgaagattttcttgatgctgatgaattggtctaaaaataactaggatatcaatagttatgttaaaatttttctaagtcattgtgtgggtatttgggacggtggcagcataattgctttacataccagtttcaaaaagggatagcttaggctccataacgcgttcgccaccgcagaaacctacgcataaggaccttggacgcaatggcccaagaccggccatcacgcccaaggccgcttatgcttcggtttctaaccgcggtggctcacgcttctcatattacgaaactgttagctcattgttacgcaattcgttggcgtcattttttctgaaaacctataatgaatgtgtaaataaaaacgtggggtggcatcatgttcgcaaaattaaaagctatgtgggagaatcccacttttcgatttattttttggaccattacgtattttcttatcctgttggtcttgatttatctctacggctacagcgggattaataacagtaaattcatttataacgagttctaaaagcgtgaactggcgcgactagaaaccggagcgccagtgaacgcgtctaaagaggaggagagccaatatgatcgataatgtgattactgcgatcgatcgggtcgccgcggaacatccaacgcgcgttgcttacgattatgaaggcacacagtacacttacgcacaattaaaagaaggtagcgatcgcttggcaggcttttttgctgaaaccttgcctgagcatgagccgatcattgtttacggcggtcagactttcgatatggtcgaggttttcttgggcctttccaagtctgggcatgcatacattccgattgatacccatagccccaatgagcggatcacgcaggtgcaggatgtcgcccatacaccggctatcatcgaagtagcgcctttgccgattgcagttccggatgttcagattattcgcgcaccagagttgcatgaagctgagaagacgcatgcacccattagttcattgcaacatgcggtcgttggcgatgacaattattatattattttcacaagcggcacaaccggcaaacctaaaggtgttcagatcagtcatgataacttgttgagttacgtgaactggaacatttccgattttggtctcaaggaaggcgttgtggccatgtcacagccaccctattcttttgacttgagtgtcatggatttgtacccgacattggttttgggcggtacgcttaaggcattgccaaaggaagtaacggacaatttcaaaacgttgttcgcaaccttacctaagctaggtttgaatgagtgggtatcaaccccgtcgtttgccgaaattgctttgcttgatcctaatttcaatcaagataattaccctgatttgacacatttcctgttctgtggtgaagaattggtcaataaaacggcgcaggagttgatcacccgttttccaaaggcaaccgtgtataacacatatggcccaaccgaaacgactgtggcggtcacaggaatggcaattacgcaggacattgtggatcaatatccgcgtttgccaattggttttgctaaaccggatacggaaattttcgttgtcgatgagcaaggcaatcaagtgtcagcgggtaccgaaggcgaattgatgattgttggaccaagtgtttcaaaggggtatcttaacaatcctgagaaaacggccaaagctttcttcaatgttggcagtcaacgcggctatcggtcaggcgatttagccacgatgactgaggatggcatgattttctatcgtggccgaactgactttcaggttaagctgcatggctatcgaatcgagcttgaagatgttgatcataacttgaatcaggtttcctacatcaaacaagcttcaacggtaccgcgctacaacaaggatcataaggttgctcaactgattgcttttgcagtggcgaagcccaatgacttcgaaagcgatatgaagctcactcaggcagtaaaagctgagctaggcaaaatggtgatggaatatatgatcccgcagcgcattatctatcgtgacaaattaccgctgacagccaacggcaaagtcgatcggaaagcgctgattgcagaggtaaatcattaatgctgaacttacaaccatatgagaatccgcaatactttgtttatctcatcattgctttactgccagttatcattggcatgttcaagggtttccggatgcactggtacgagagtcttttctcaatcgtttttctggtgatgatctttgatgccgataagtggccgcaaggtaaagcactgttgggatatgttgttttcaatctgctcttggtctatgcctacttcaagtatcgtacgcgagaaggatcaaaaaactcaacggcagtcttttatctcagcgtcattttgggcattgcccaattagtcgttgtcaaatttacaccgttgttccaacatcatggttccattcttggatttttgggcatcagttatctgacatttcgggttgtcggtaccatcatggaaattcgggatgggtcaatcaaagatttgaacatgtggaaattcattcagtttctactgttcttcccaacaatttccagtggtccaattgaccggtatcgccggtttatcaaagactatgatcgtgtccctgatccagagcattatgcccagttagttactaaggcaatgcattatttgatgcttggatttttgtacaagttcattcttgggtacatttttggaactttatggctcccatcggttgaacatatggccatggtcagtcgtaccggcgcatttctaggcttaagctggccggtcgtaggtgtgatgtatgcttactctttctatctgttctttgactttgctggttatagtttattcgccgttgcgatctcgtatttgatggggatcgaaacgccaatgaacttcaataaaccgtggatgtcatacaacattaaggatttttggaatcgttggcatatgagcctaagtttctggttccgggattatatctacatgcgttttgtcttctttatgatgaagcataagttgattaaatcacggatctggacagcctttgtcggctatctggtgttgttcctgattatgggtatctggcatggggaaacttggtattacatcacgtatggactattccatgcgatgttgatcaacttgacagacgcttggctgcggttcaagaagaagcacaaagacttcttcccgcacaacaaagcaacgcattactttgcgatcttcatgaccgctaatgctgtctgcttctcattcctgattttctcaggattcctagacacactctggttccattaaggtaacgttggtacaggcttgtcgctgtgacgacaagtcgcggattaaaaagaaagaggtacttaataatggctgacgaagcaattaaaaatggtgttttagatattttggcagatttaaccggttctgatgatgtgaagacaaatttggatctgaatctgtttgaaaccggcttgttagattcaatggggacggtacaactgttgttggaactgcaaagccagttcggcgtagaagcacctgtttctgaatttgatcgtagtcaatgggatacccctaacaaaatcatcgcaaaggtcgaacaagcacaatgaaaaaaccgatcgggaagatcctttggcgcggacttggcccgctgctgatcgctgtgatcctggtcgctgcgttgatgctcgtgccatttaagtttggccgcagcagccaagcaacgattagacaagcggccagctctatgtcggccaacgtgcttaaaggcgagaatatcaaaaatgaagccatggccgaaaactatgttccgtttatcgggtcatccgagctgtcgcggatggatgcatttcatccttctgtcctggcacaaaagtatcatcgcaactatcggccattcttgatggggatggctggcacgcaggatctcacgcacttcttgtcgatcaatgcgttacaacatgtgaatgggaaaaaggcagtcatggtgttgtcaccgcaatggttcgttcctggcggggttcgcaaggcgcagtttgattacttcttttcgcctgcacaaatgacaaccttcttgttatcagcgaatcctaactcagaggctgatcgttatgctgctagtcgattgttacaatttccatccgctgactctgatcgcatcgccaatgatgctttgaagaatattgcggcagggcagaagttatctgacagtcagtactggtatttgaaacaaatcaaggaacccatgtctgaccatcaggatattttattctctcagctgttcttggataataatcaacctaagttaaccaaagcagccaagacgctaccaggtacttacgatgctgatgtattggatggtctggcaacacaggatgggatgaacgaaacgacgaacaacgcgtttgagttgaaaaatgatttctacaccaaacgggttaagcgtaatttgcctaaattaaaaggctctcaggcaacatggagctatgtgaaatcacctgagtattcagatctacagttggtattgaacacgtatgcaaaaaagcacatggaggtactgttcgtcattccgccgatcaatgccaagtgggccgcttatactggtctggatctcgggatgattcaaaacacggttaccaagttaaagtatcaactgaagtcccaaggttttaatcacgttcttgatttgagtcaagatggtgctcagccatacttcatggaagacacgattcacattggctggcgtggctggctgaagatggatcaaactgtccggccatttctcaaaaccaccaaggctgcacccgtgcactacaagctgaatgatgacttttacacaacgcggtggcagcagcgtagtgctaatggcttgaactaaaacttgtcgagattcaaaaagcatcatactcaaaaaggagtctaaacgtaagcaactgcttgcgtttagactccttttgattgagcagtaagcatgcaaacccaaaaataggacagtcaattatgatacgagtcttttagcctattttttggttggttggtgatcagtttccaagtcaatcagatgttcagctcgcggttgggtatcttgattatccatcacaacggtcagaacaacgttttgctcgcgacgttgaatcgcactaccgccttcgactgcaaaacctaaaacttgttgcagtgtttgcgccaagaaccctgcttctaattgaaaatcaggatcttcatatgtacgaattcgcgttgccacaacgtcaccagcgagtaaatattgccgttcctgccgcttttgtttgagcggggtgagcgcgccaaagccaacctgcgtgaacagttgcggaatggctgtctcatcgacaggcaacttagcagccaaatcgcgcccagcccaataaaggatgttgtgctgttcctcgccaagcatattcggcagcatgagatcacgcatcgctgtcaacgcaaagaacgaaaccgagcctggaaggttcagcagggtggtatagtcagattttgccatgttgtgcctcctgtttctattcgtctagtatagcggaaaattcaaagcaaaacatgattttctcaacgcttgcaatttttaacaagaaaactcacaataaagtttcagagagcgtgagcaggcgcggttagaaaccggagcataagcggccatttagcttcaaggtccttatgtgcaggttcctgcgcctgcgaacgcgttttagcggatccccgagggccattttgcgaccaaggtccttacacgcaaactctcggacctagaaatgcggctaaaaacgatctgtctcacacctctacagcttcacccaaagcccgtgaggcagaacattttaaagagaatcctatgcagacattttggcaacatgaactactttgcttgccatccctgcaaacctgtttcaaaaggagaatatttcatgaacaagcaaccaatcggctttattgattctggtgtcggcgggctgacagtcgttaaagaggcgttgcatcagctgccagctgaaagcagtgtttatctgggcgatcaggctcgtttgccatatggcccgcgacctgccgaacaagtacaggcgtttacttggcagatggtcaatttcttgcttaaaaagcatattaaaatgctcgtcattgcctgcaatactgccaccgcagcggcattacccttaattaaggctaacttagacataccagtcatcggtgtgatcaaacccggcagtcgggcggcactgaaggcgacgcaaactggtcacatcgggattatcgccacagaaggcaccgttaaaagcggtgcttatgtgaaggctttacgcgcaaaggcgccgaagattcgactaactagtctggcggcccctaaatttgtctcattggtggaaagtaacgaagcccactcacccattgctaaacgggtggtggctgacaccttgcaaccattgctgcatgaagacattgacacgttaattttaggttgtacacattacccgattctgcgcccgttgattcaaaatgtgatgggtgatcaagtgaccttaattgattccggcgccgagactgtgaatgatgtttccatgctacttgattattttgatctagcaaacaacagcggcgacaccccaactcacgaatattacacaaccggggcaccatcaatgtttgacgaacttggcgaagcttggcttgaactgacggcgccgatgcacgccaaacatgtcaacattgaggctgaggcagaccacgctatggatacagtgcctgaagcaaagggtaaaacgattgtcgttgccagcaaaaatcaaggaaagattaaagaatttaaaacaatgtttgaacctgctggcatcacggtgaagagtctagccgactttccaagcgtgccaacagttgacgaaactggcacaacatttgaggagaacgcccgacaaaaagccgatcagtatgccaaagatttgcagttgccggtgattgcagatgattctgggttgatggtcgatgctttagacgggcaacctggtattcgctcagcccgttatgcaggcgatggtcacaacgatgcagctaacaatgccaaactattggcagccttggcagatgtcccggaagatgatcgaacagcgacttttcatactaccttggtgcttgctaaaccggatcatccggaagcagacttggtggtacatggtgatgtgagcggactaatcactgcgatcccacgtggcacagatggttttggctatgatccattcttttttgttccagcgttagggaagacaatggcggaaatgaccgctgaagaaaaaaatcaaattagtcatcgcgggaacgcaatgagggcacttgaagatgtttggcaaacatggttggaggcaaacggatgaaaattttagcagttagcgatacccacggtgatcgagagattctcacagctttgttgaaacaacagccgcatcttgatggctatttctatgccggtgactcagaattagccgctgatgatggcctttttcagcagtacgaggcagttgaaggcaacatggactatgatcctaattttcccatgcaaatcacgaccaccattcaaggtgttacagtcttcatggcccatggacatcgttttggggttaattttggcctagataaactcatcgctgcgggcgaaggggttcatgctgatctgatcattttcgggcatacccatcagttgggtgtggaggaacatgcggggattgtgattcttaatcccggttctatcagccagccgcgtggccagtttgccaaccttggcggaacttatgccactgttgaatttactgcggataacgttcatgttgattttttgaagcgtgatggggcaatcgtgccagaattaagtcgtgatttttcaaggaagcacgattaaaaaaagatctcactagcaggacgctgtcaattgacagtgatctgcaggtgagatcttttggcgctacgatatttggagttgataggcagcttgcctaccagctcctttttctataccatttctatatttgaacgcgcaaaaaggacattacactttctgctcgttcactgtcccgaccaaagaatagagaataggagtttgtgtaatgtcccttacaggtaagtctatccgaatggttctagaaatcaaggaccctaacattatctttacgcaagacgctgtcattgaagaaattcggggcgctaaagcccttgtcttctatgccgaacttaaactccaaccagagcattgccctgcctgtggctttgccagcaaactagttcgttatgggtttgaacgtacctgcgtacttatgcccagttacagctaccgtcccacctatatgaagcttagccgtcagagatttcgttgtgagttgtgccggtcggtctttcagagtgagactgattacgtccgaccgcgtagcaccatcagcaccccagtccgccagatggtgctatttgaagccttcagcaactgttcattaaccgacattgcgcgacgcttccacgtggctgataagaccgtccagcggattattgatgaagaagcggcgaagtataactaccatcaaaagctatggctcccgaagcatctggcttttgatgagttcaaagctaccaacaaaatgagcttcatctggggtgatggcgatcgacaccagattggcgcaattctaccgagccggacggcatacgcaataacgaagtactttgaaggctttccactcagtgtccgccagcaagtgcagaccgtgtcgttagacctgaacgccggctatatcaacctagttccacgtttgtttccaaacgccaagatagttgtggatcggttccatatcgtccagatggtgtcgaccgccctcaacatggtccgtatccaagtaatgaagggtctatctaagcgtagcaaggaataccgattcatgaaacgcgagtggaaaatctttcttaaggacttcaacgaacttgaagcaataaaacccacgtatcacaccagcgtcggctattacgaaacaactgtaaatctggtcgccaagtgcttagacctgagcccggagttccgggcagcatatgaagtctaccaggagattataggagcggttagaaagcgtgatgcgtcagcactcgcagccgcactagagagctatcgatcattaggaaaccgaatggatcagtctatcaaaacgttaaagaagtacaagagacaagtcatcaatgcattacgctatgagtactcaaatggcttccttgagggtattaacggcatcatcaagaagattaagaacactgcgtacggctatacgaattggaacaatttcatcaatcgtatattcctggaacgggtttggttcagagctaagagcagcaaggcagcagcataataaaagcatctagaccaattaaggcctagatgcttcacaaaagatctatcaactctacttgacgaagagccgatctttttggctagcctttgatgaatagaactttgtaggtaaagacggctaggatggctgctaaaatcggagcaacaaccggtacccatgagtatccccagtcggagctacctttatgtttaagcggcagcagtgcatggagaatgcggggaccgaggtcacgggccgggttcaaggctggcccagttggtccacctagcgaggcaaccaaggtcgcgaccagaaaacccagtcccatgtgggcagtacccagattattttggaaaaaaggagccttggtaattccgagggcaccgataaaaagaatataggacccgatgaactcgttgacgaaaccgttaagcttgctcttggtggcgctgatcgtgctgaaggtgcctaaaacatgctgtgtattggttgtgagatcataatgcggtttgtaggccgcaaccaccaataactgaccgaacatggcaccagccatctgtaccgcaatatatggcaagacttctgaccatgggaacatgccagatgcagcgagtccaagggtaaaggcgggattgatgtgattgcctgaaatcgcgccaaacatcatcgcaggaatcatcaccccagcaccgtagcccacggcaatgagcaaccagtcagagccgttaccttttgtcccttttaaatcaacgttggctacagagccatttcccagtagcaccataatcgcggtgccaataaattcggcggctaaacgcacgcctagatcgtatgtcatttgtttcctccaagtagttaaaataatacccaaaagcttatgaaagtataaatatagctgaaaatagtgtaccaactttttggggaaccgtccatttaaacgactagtaagcgtgggcaggtttctgtgcctgcgaatgcgctgctttgcgcattatcggacgaattcgctcgaaagatggttgaatcaattaaccaattgtccgtcttttgacggatggcagcgagtaacgtaagcgttaagatgaaataaagaagttgcctgaagctgaatttttaggcgtactcaggtaaaataggactgtcaataaaggagttgctcatatgttaaatccagtcattgccaatatgctgatcgaaaatcggcatcacttcatgatttcagccgacatggttgcaactgtgtctgaaaacaatcctttgagtcatgcctttttggtattgaccaaggtgcggtatgcgaaaattcccgtcctcgatcatgattcaaaattcaaagggctcatctcactgccaatgattaccgagaccatgcttggccttgatcacatgagttttaattcactagatacaatgacagtcaaagatgtgatgcagacagaggtcgcgaccattgatgatccctacgacttggaaaatgtcctacatttgctcgtcgataacccattcattccggttgtccaagatggttactttactggcatcgtcacccgtcgtgaagttatgaaggggatcaataatattggtcacaacatagataagaattttcaattagaacccttaacagttacggtacctaaagaatcttaacttagaaaaaacgtcgcattgctaaaagcatggcgacgcttttttatatcagcgagcacattcagtgacagtcgtgatgccaaacttattttttctcgtcagcatctggtttgtctaagaaaatggtggcgagcacgccgatgacgaggctaatgacaaccatggcgatggcgccgaagtgatcggtggctggccaataaggggcgataccagcttcgataagaattacgactgctgccaagacaatgccgcaaactgcgtagtagacttgtgcttcaaaatgggccaataagtaggccatcaatttagctactgctatcagacctgctgcagccccaatcatgaacgggagcaacaaggcaactgatcccatcgccgtatgaaacgcgggccagttgccggatgcagcagcacgagcagcatcacccaactgacccacagcattgtaaaccgtaccgtattgatcaatcaccatcaacatgactgaaccagaaataccgggaattgccatcagtgaaactgcaaaaacaccggcaaaagccatgacgccagcatcgctgaaacttgtcaaacgtttaatggcaatcagattctcagggtcagtaccaccaagcttagccagcccgtatatggcaacgaagccaaagaccactagtagtaagtaccaccatgaaaactttttggttgtcagtttacggtaaatgaacggaccgatacccagcactaaaccaataaagaagccatagcttggcagcggccagcgggtggtgacgaccagaaccgccttagtggaaagcaggataccgatcacagcacccaacccgatcggtgtcaaaaaccgcatatttttttttggatcatcgcgaaaatggttgaccgcatttaacaatcggtcatagaggccaacgaccacagcaaaaatactgccagaaagtcctggaatgacaagtgcgatgccaataatggcacctttaacgaaatttagcataacatctccttttgaattgggttaagccgcttgatgataacgtgacaatggcacggtggttcatgaaccactttgcaagtttaacggcggtgtgacaacttttatgcctgcagaattcaaggcagcaacgtaggcgcctaagaaagtgcgttgcaggctcacttgttcgccattttcggcgtaaaaaagaacctgataggtgaaagcaccattcttttcttcagttagcccaagaatgtcaggctcctcggtaatggttgtaaatttcggtaccaaatcttgattcacacgttcaatggttttccgaactagatcgagatcagcacttggggcaagcggcaatttaatcagcacctgcatattgcttcgcgaaaggttgctgacgatggtgatgttgcgattgggaatgaaattgacagtcccatcggaactcttcaccaccgtcgtccgcaaaccgacattggtcacggtaccggagatggtgccgagtttgacgacatccccgacatcaaattgtgcttctaaaaggatgaagaagccggtcacgacgtcgtttacaaatccctgtgccccaaaaccaactgccaaacccacaaccccagcaccggctaacagtgtccccactggtacgccgagaatcgataagatggcgtaaaggtagaagaagagtaccagatagaaaaaaacattcaccgataacgcatgaattgttttgacccgggtgcctgtcagatgtgcccgtcgttgatagcttttaaaggtgcgattgagcgcaaagcggccgagccggtacaaaattaaaaataagacggtgaaaaacagcaacgacagcactttgtcgataaaagtgcctacgattttatcccaatcgatggttgtaaaatatttcagccaaacgttggtttgctcgttgacggttgttgctgtgacgatcatgtgtatcacgtgactgcctcctttacattggcactattttaccagaatcggtgggtgtgtgctgggagatttggtttgagtgggcggtaaggttttccaaaacgcgcaaaccggcgcagaaacttccacgtaagaaccttggacgcaatgaccccaaaccggtcatcacgcccaaggccacttacactccggtttctgaacggggctgctcgccaaaacgcgcaaaccggcgcagaaacttccacgtaagaaccttggacgcaatgaccccaaaccggtcatcacgcccaaggccacttacgttccagtttctaagcgcgccggtttgcgctcttaatttttttgcaccgttcttgtcacgatgttatgattgttttaatcaactggtttgaaataggagggtgttggatgtcaggtggagagattgcttggattatcgcggctattgcgtttctgattattgcacttgcaattgcgattattgcggttcgtgtttctggtgtgacgaaagaagttaagggcacggttgccgagacgaataagacgttgaacacgatcaacggagagcttggcattttgacgaaggaagttgaaggtcttttggctaagagcaacaccctgcttgaggacgtgaacggtaaggtggcggcaattgaccccgtctttactgcgatcggcgaacttggtgagagtgtctccgatttgaatcaatcaacgcgcaatttaactgagcgtgttgcgcatggtgccaagaacggagccaaggcgaccgttgcggctcgtatgagtgccaaggcgttttcaatgttgacgaagaaaaaacataacgatcaatagcagggggaagaatcatggctaaaaaaggacattttttgcttggatttgtattcggtgccgctagtgccttagccaccacttatttattaacaccacaaacaagcgatgaattgaagcggcgtgtgaagcatgcttctgaagacttggcagatcgggcagttgattatttcgattatgccaaagaagctagcgctgactggaaacaaagtgccacagattttgttgatgaattgaagcgtaaaggcgacgatgctgatggttctaaagcattggcaaactatgatgctgccaccgagcaattgcgtgatcaactgaatacggcaacagatgtggactcatcagcagactttgatgacattgttcttgacggtaaaagtgcttttgcgcaagctaaagatgatgacgagggcagtgacactcgcaccgatgaagtgccagaaccagtagaaccagaagcagttgcaccagcgtcaactgataccgcaccggctagcagtgtcgcacctgatgaaccgcaagcatctgcgacaaatgataagtaacagacatgcatcacttagtcacaattgatgaaaaaaaggcgacaaacggattgttcctatgattggagcaagacgtttgtcgcttttcgcatcagttattgtcaatttgccataatcggtggtacttcatagatcaggcaggttggggccttttgcagcaaccaaacgacgacttggttgccaaggtcgcagcaccgtctatagatcttttttaaaggagagaatatgctgaatagtgaacgtcaagcgcagatcaaggctgctttaagtacagccgctgagccgcttagtgcctcaagttttgcccggcagtttgccgtgagccgccagacaattgttggcgacattgcgttgttgcgcgcacaaggtgagccgattattgcaacgccacgagggtatatgttttctcgaccggccgcccatgagtttttgttgccttgcaaacatacgccggcacaaactgccgaagagttacagttgattcttgaaaatggcggatggatcgaggatgttttggttgagcatccgctttatggacaattgcgcggccagttaaacatccggacagtggctgacatgaaactgtttatgagtcggttgtcgcgctatcatggccgactgttgtcagaattgaccggtggcattcatttgcatacgattagcgttaaaaatgagcgcgatatgcccaaaatcaaagcagctttgcggcaggcggggatgctatatgaacaagtggagcagaggtagtctgatgccgctaaaaaagccgtccggaatctttccgggcagctttttttgtggcatatgaatacgactatagtgcagttttttagacctgtcctagccgttaatgaccgtgaattcctttgaggtgtgggtaaatggttcgcagccggtttcggtgacgtggacacagtcctcaatccgaacgccagcaacaccaggtacatagatgcccggttcgattgagaaacacattcctggctgcaacagcatatcgtttccttccatgattgatggaaattcatgtgtcgacatgccaatcccatgaccaagccgatggttaaagtaatcgccataaccagccttagtaatgatgtcgcgggcaatcttatcgagctcggatgctttcaaaccaggcttgacagccgccattgcggttaaattggcctctaaacagacatcgaaaatttcccgcggcttgccggtgacctgaccaaatgcaacagtacgggtggcatctgacatatagccatggttgtcagtcccaaggtcgaacaaaaccaactcgtttggttgaagcttggtgcccattggttcaccatgcggattggcagcgtcgacgccggcctgcacaatggtaccaaagctcatgtgcatgacgccttccttcatcatggcataatcgatttcagctgccacttcttgttctgtcgcgccagctttgatcgcgttaaagccggcctgaaaggcgcgatctgcctgagcaccagctgcttccatctgtttgatttctgacggtgtcttaatgagtcgctggttctcaatgaaccgggatgcgtcaactgggaaggtagcatccggaaattgtttcatgagagcttcaaatttgaagacagctagattatctttttcaattgcccattttgtcgggttcgctgtcaccgctttgatgtgattagccatgatggcaaatggatcttcgtgatcaagataaccgaagacttggtacggccagccagcttttttgacctcttcaatcgtcagctgaggggtgaataggaaaggatcgttgtcaggggtgacaatcaacgctgtgatgcgttcctcaggatcttgaaaaaagcctgtgtagtagttgatattgattgggtcgctaatataggccaggtccaacccttcttttgcaacccaagcttgcaaagcagctaaatgttcattcatattttttcctcctcaacgtgttcactggcgcagtaccatgcagacgcggtgcactttttaaccggattagctcgcgatctggcttaaaagtcgtgcgccaatcaagcatcgtggtaaaatagcacaacttaaaactttaacttttagtatatcacgtgactagcttgatgggctttctgaaaaaggcggttgtgaaaatttcatgtaaaattcagtaaaacgcttgcattgctatttctattctgttactttggaatgtaaatagaacttcgtgatttcatcttttcacgactaaggagaaaatcaattggaaaagcaaacaattacaatttatgatgtcgcacgcgaggctaatgtctcaatggcgacagtgtctcgagtcgttaatggtaacccaaatgtgaaaccagctactcgcaagaaggttttggaagtgatcgaacggcttgattatcggccgaatgcagttgctcgtggtctggcaagcaagaagacgacaactgtcggggtaattatcccagatgtcacgaacatgttcttctcaagcttggcacgtgggattgatgatgttgccacgatgtacaagtacaatatcatcttggcgaactctgatgaaaacaatcaaaaagaagtcacggtgttaaacacattgttggctaaacaagtggatggtttgattttcatgggccatgaattgactgactcaattcgtgctgaattctcacgcagtaagacccctgttgtgcttgctggctcaatcgatcctgacgaacaggttggcagtgtcaacatcgattacgtggctgctgtcgaagaagccacgcgtcagttattggaaagtggcaacaagcgggttgctctggcgaccggttcattgacgcatccgatcaatgggcagttccggctcaagggttacaaacaggctctggaaaaggccggtgttgcttatgacgaaagcctgatttttgaaaatgagccaagctaccaagctggtttggccttgtttgataagttgcagaaagttggggcaacggcggttattgcaggtgatgacgagttagcagttggccttttggatggcgcaattgataagggcgttaaggtgccggacgactttgaaattatcaccagcaataacaccaaactgacggaaatgactcggccacaacttacttcgattgatcagccattgtatgatattggtgcggttgctatgcgcttgctgaccaagatgatgaataaagaagagatcgaggaaaagaccgttatgcttggcttcgatattttgaagcgtggctcaacgaaataatgccagcttttgtgagctgtttagctgacatgtaaagtcgttaggacaaagaaaaaggcctccaagcaaattacttggaggccttttttcttgcgttgaaacgaaaactcgtgatcgtgttgttactgaccgccgccagtcgttgttgcaggtggggtctgttgttgattggtattattagtgccaccagtattcgtaccgccaccagtcgttgtacctgtgccggttgtcgtgccagtttctgtggtcgtcccagtaccgccagtcccaccagtgccggtggcgccattcgtgccgccagtcccggtggtttgtggttcgcttggctggttttcagatgtcccttgttggttttgctgacttgatggcactgtcacgctaggagcactgctaggtgtcgtctgagtatcttcagttggcgtgatcggggtttcttgatgttcttttttggcttcagttgaattgccgttggcatcggaaacctgaccatagccattttgtttgccatcaagatggtcgaagaacaactgataattagctttactgccaccgatggcaaaatcatttttcgtggttggctgccaatcattgtaaaggctggtgacggttgagccgccagttcggtaggtgtttccgtcaaaagtcaaggtgccagcgggttgcccagtttgtttatcgacagtcactgatttaaccgtatccgggcgtgccagtttctgattaaccttaaattgtttaggaatcgtctggtaaactgcgttggttaatttagcccaataggcttcattggtcatggagccagtctcatctagtgaataagttgtgccatcattattgtcatagcccatccaactggcgattgttaccccaggtgtcgagccaataaaccagatgtcccggaaatcattgctcgtccctgttttcccgatcaggttatcagtgttgaagtggagttgataattgaggctttccgcagttccggaatcaatcacgtttttcaacatttgattcatgatgtaggtcgtgcccttagagaagactttagttttcttaaccttatgttgatagattggatgaccagacggatcgacaatctccgaaatcacgtaggctggtacgtgctcaccttggttggcaaaggttgaaaatgcgctggcttgttctttgacatcaaccccgtaatcagtcccgcccaaagcgagtccaagctgactatagtcatttttggtgagggtatcgatgcccattttatccatatagtccttaacattaacggtcggcttgatgtgtttatataagttgactgctgggatgttgtaggattgggcaagcgcttcggtggcaggaataaagcgattctgaatctgaccgccgtagtctgtcacgctgtaattgttgccgagatcggttttaaaatcagccaacgctgtttgcgagccgatgattttttggtcaacggccggcgcgtaaactagcaaaggcttaatcgttgatcctggcgaacgcaatgtatagatgtgattgagttcaccagagactccgccaacgaagcctaaaacagccccggtttgattgtccaagacgaccgaaccattttggactggatgtttaatggtttcggtttcgccagtcttcggattaatttgtgtgctggtataagtctgaccaaatgtgctgcgtgttgccttcatcacaaattgcatccggtcgtaaacatctttgttaatcgtgcttttaatctgataatttttcgatgaaaaaagattagcagcttgccgcagatagtcgttgtttaaggcgttgtctttcgccaattcggcggcggaatggccatcgtttttagccaactgctcagcaagtaatgattcggcttcgcttaacaccatgttgtacacgtagccatattgattgtcgtcttcttcagcattctcatgctggagaaaagcacctttgatatcaaatgccttggcgtcgacatattgtttatgactaatgaccccagctcgatacatccggaatagaacggtctgctgacgatccacaccatctttgagattgcttttaagggcgccagaagcggtatacggggtgtaaataaacggactttgtggcaggccggcaataaacgctgcttctggcaggttgatgtccttcgccgagacgccgaataggccttgggcagctgcctcaaccccagctatgttttgacctttattgttacgaccaagtgtggccacattcaaatacgtggctagaatttgatccttgctaaaatgattatttaaacgtcgggccagcataaattctgccgctttacgtttaaaggtcgtttctgagcttagaaacatcattttgaccacttgttgtgtcaatgttgagccaccggtttgattgcccatgccagttaaatcagagaaaaaagcacgaatgaccgctttgggtacaacgccatcatgccgatagaagtcttcatcttcagtggcgacaatggcttttgtcagccaaggcgacatttcattcaaatcaaccttggttgagaccaaatcgcttttaacattgctgagtttgacattgtgagcaaaatacatgctggaagtgcggcttgtattggaaagggtggccttcatggcagcttcggtcggaatcggggtggcatcgataattgaaacgaaatagccgccgaataaaccgaggccaaagacagtcgcaataccgagcacgccgagtaagtaataaacaatggttttaatactttgtaaggtgacgttgccgtaaaagacaacggcctccttgccagttaagtttgttgtctctgcttcggaatcaggacgccgggtcacaaacgcagtgaaccagtggcgaaatcgagtcccgagcgttttgactcgatcaaagaacttcttcaaatgcttgtcccaccttaaattatggtctagtacgccttagtataccttaaatattaagcggattctaaccggggatttgttgaggcgtgtgaaccgacctagcctaaaaccggggtgtaagctgcttgaggcgtgatgaccggtttttgacggggtcgttgtctgcagattccaaggctagtgagcacatctttgacgcagtggcgaagcctaagcgctgacttcgcaaacagcttgtcacgtctcatcaggtgtgtaaaactgatagcatgtagctttaagacgagaataggagcttagtatgtatcggataattttgtttgatgttgatgacacgttactggattttaaagcaggtgaactaaaaagtctggcaaagatgtttgccagactcaatttgacttactcgccgcggattgaggcaagttatctgaaaattaatgccagtctatggcgtgactacgaagcggggcgcatcacgcggccagaattatttgatgtgcggtttgccaaactctttcgccatcatcacattgaggctgatccgcatttggcagaacgcacctatcatcattttttggatcaagaggccattttgctgccgcgagttctggacaccttggatgcgttgcaggattatcggctgtttattgtcagcaacggtatcgagcctgtgcaacgtgaacgcttggcatcgagcggtctgattgattactttgaagatatttttgtttctgatagcgtgggcagcccgaagccgaccgtggccttttttgactatgttgccaaacgcatcccgcggtttgaccggcgtgagacattgatcatgggcgactcgctgacctcagacattcaaggtgggatcaatggcaaaattgattcgatttggtttaatccacattttcagccaaatcgcgatcacatcacaccgacttatcaactcaacgaatttagcgatttgacgaagctattggcgcttaactgaggtgacttagactgtttcaacgagtcggatggtgccgcttgagaccaccaatgtgccaagatctgtttttaatagtaaagcgccgttatcatcgaatccgctgatcgtcccggtcagcggattttgtgtgccgctgaccgtgatgcggcgaccaacccatgctgctcgtttgcggtacgctggcatgatggtctcgggattggcaaaaagccgcatcaagtgggtcaaataacgaccagcaagctcgggacgcggatcatttgcagggacctcgcgcaaaatggttgtcatcggctgatcatttggcaaaggaccgctggcagcagggaaaagatcgacgccggttcccaaaatgacagcattttgttccaacaacgcttcggctaaaatacccgcgactttcttaccagctttctgtagatcgtttacccacttaatctgagtgctgatgccaaactgatcggcgattgcttgttgaagcgcaacaccagcagcaggtgtgattagggcacggttaatttgtggatgaaacgcatagctgatgtaaagtccagcatcagctgggcttgcaaaatgtttaccatgccgcccaacgccagcggtttgctggtcggcaattaaaatctgtggcaaggggccgccgttttgaacggacttttttaaaatgacatttgtggatgtgacggtacctgctgtggtgacagcggcacgcaaacggggatcatctaaccatgggtttaaagcatcaggttcaaacataaattgcttcctttcagacgttttgataacggttaacgccaacaaggccgacctagtttaaaactaagacggccttgcatgaactgaatgtcgataaaatgacgcccagagattacttgaccaggcgactgatggcatcggcataaatggcaacagccgtgatgatatccttaatcggcatgtattcgttagcttgatgcatcacattttcttgacctggcatttgggcaccgaatgcaacgccgcgcttaatgatacgaccataagttccgcctccgatcacttgctcatgtcctgggatcccggtgtgatcagtgaatgtttggagaagtgttttcaccaatggatcatcccctggcacatagtgagggccttgggcatgaccactgatgcttacggtgaccttgtcggcgcctaatgtcgtctcaatctgatcacgaatggtgtcagcatctgtcccttgcggataacggacattcacaagcacactttgttcgccatcttgagtaaaggtgaagatgtctgggctggcggtcaattcgcccatcagcttgtcggtataattgatgcctaacagcttgcctcgtgagtcgttgtgcaagtatttagcgaccatcaggagataagctttaccggctggatcaaatggcaagtctgccagtagattggccaagtaagtgccagcatttttgccatcttttggctcctgtgcatgtgcacctttgccgacaacttcaatggttgttggattacccaaagtaagggtaagtttgacgccagcctcatccgcccaagcggttgcttgtgtggcaaaagtttctggtaaatcgccggtgatggtcgcagttgcgacttgcggcaccatgtttggccgaatcccggccgagaagttggtgagcgttaactcagctggtgcagcggcaattggcttttgatcgattttgaaactggcaatgcctttttcaccgttgatgattggaaattcagcatctggtgagaagccaaaatccggtgccggctgggtttccagatagcgatgaatcccgacccattcggattcttcatcggtgccgatgataaagtggatctttttattgattggcaggccaagatcacgaatcaactttaaggcataataagctgcgatgcttggtcctttatcatcgctagtgccacgcccataaattttaccgtccttgataacgggtacgaatggatcagtttgccaacctggacctgctggcacaacatccacatggccaaacaaaccaaagatctcgtcaccgctgccaagctcaatgcgaccggcaacgttatcaacattaagtgttttgaaaccatcgcgttcggcaattgtcaaaaaggcttccagtgctttggccggtcccgggccaagtgggtacgcctttgtttgatggtccgtatcgcgctcagagttgattttcaaaagggttgtcaagtctgaaaggagttgcggttctaacttctctgcttcttgctgccaattaatcgtcatgaggttaacctactttcttactgtcattgtctttaggatagcatgtttaatcatgggaaactaataagccgttcatcaaattgtgagggttgatagtcacaattgatgaacggcttatgattgagcgtggttcggcgattaaccgatgccaacgacgctagcattcaacagtggtgtgtcaaaggccgtgtcgcctaatgcccagtggacaagtggcttttgtgcagcaggaatactgcgatattgactcatccaggtagtcatattttcagcatctggcaacagttgcaaatcttgggcgtttagccaaccggttttgatctttacatagaggtgattgccttcataccgtgccgctgtgatgtgatgacgcgtatggttagcgatgtgagcaatgacatcttgttgatgcaacggatcagcgtatactggcacgcgaaatttttttccggtgacaacagcattttgattaatgaagaggctagcccatccggcttgcggcgcaagattgacagttgtcgctggaacgaaagcattgtcgccaatttgataataggtgttgccagcaatcgtgatcatgctggaaatcatcacaggggtttcaggcgctaattgttcatggcgcaacgtcggctgatatggattttcgtaaatgggtaagggcgtggtactggagttggcaccaagatcgttaatatcggttgtcactgcagcggccttcaatgcctgaaattcatgccctagagccgtatagttggtgacgataccgtcaatgttgagattcaccagccaagtccataatgagcgattttcgttcatctcgtcccagatgtagacttttttgccaagatcgtgaagttgggtcacaagttgcggtgtcactaagtccgaactcaggttgataccatctacgtaggttaagacatcaaaattgattcgtttaagtgagccaacaataaggatacggggcacattgggcaaaacggcttgaagcctttttaagcttgcagcggaaaatgagtgaaacatcacacgattttccatgtgatacttttggattaatgccgctattttgtcttcgagatggggatgaggttctccctttacgattttggtctcaattagaaatttatggttggtttgttgctcatgaatgaagagatcttccaagctgtgaatcggctcgccatttttggtatgatattgctgaagttgagcaaagttcgttgtggcaattgccaaattagcgccggtcattcgttgaatcgttgagtcgtgttgaatcaccacgacaccgtcagcactttcatgcacatccagttcgacatagtcggcgccattattaaaagcactgtcaaaactttggtaagtctcttccggataattcaacggatcgccgcgatggccgatcagcgtgaaacccgaaagcagaaggaataaaggcagcaatagcactgccagcgtgagtcgcttgcccatacaggctgctcctttccagaaaaaaacatcataccataaacatagcaccgcaaagtagccgggacaatttttagaacacgacaagcagtggctaaattgataaaggagtacgaagaacatggctgataaatttcaagttttcgatttaattcaagaaatcacacggaatgacggtagtcgctattttgaactaggtaacgtcatgatgaacggtcgggcggaaaaggcggctatgaaggggcttattaaacgtgtgcggatcgttcaactaaacattcctcattcaactgctgtgacagcttacgaacagtacatcaacgatcattatgaattcccgtcagctgatttgacgagctgggaagagtgggacaaaccagaagggccggtacgccaggcttaccacgagattctgaagcagaaccatgttggatgagtggtgatatcgctggatcgtcagcgacagtaacaatttaaacaaaacctaacaaacactggcattcacactggtaacgttggcttgggtgatgctagcagcggtgcggtggctttagtctcacctactgcgctaactaggtgagcaccatcgcgaatcgtcaggtagttggcttgattttcggttagtttgatacacgccgcattttgcgtcacgttgacgccacttatataatgtagggcatatgaaagtagggcattcactaggttgattttggccgcgtgaatgtgaggaggcgtcagcgtgaagtattttggtaaatggcttattccgttcgttgcggcaattgcggtttttattggcatgcagtttgatagcagtctttacgccaaaccagtcggtcgtgtcgaatcagttcaagtcattaaaacgaccagtcatgatgatgaggatcagaatcatgatcggctaaccaagcaacaggttaaagtgcgtttactgaacacagcaaaacgcgggcaaagcgtcaccattcataatacgtactcgttcagcggcggtttagacaatcagttgcggccaggtgaacaaatctttttagatgtcgataagggcgtctatacgctcaacaacatcaaacgcgatgccatccttgcggcgttgcttgttttgacatttggcctaatttttttggttatggggcgtcgcgcttggttaacaagtattagtattcttttgaacacggtgatcttttttatcgcggtaacgtgggaaattggcagtaagcaatggcaggcgtggtggttgtttgttggtctagcagtcgtatttacaattctgactgcggttttcattgttggttttaagccgattgccgtcacgatttcactgggatcgttactggcaactggccttgctgtggcgctaggctatggtgtactgacgttgacaaattataacggtgtgcatctggaagaagtgaaatatgcgacgcaaatgccgcaattgctgttcttcgctcagattgttattggttcattaggcgctgttcttgatgaagcaagtgacatttcagtggcgatttttcagttgcatgacagcgccaaagaacggtttcaggcaggtatggcaatcggccggaatgtcatgggaccgctaatttcagtgctctttatgatctttattgctgatacttttgtggaatcagtgctatggattcgtaataataactcgattgcacaaacagtcatttgggtgatggggcttgggtttgcccaaagtttaattagtgccttcggaattgtcctagcggtgccaatgacgagcggtttagccgcgtttatggctaaaataaagaaggtggcagcatgaatgcaattcttgccttggcactattgctactagtcatgatgctcttgattgggggcaaacaaggcctagccaatttctttgcgctgacggtcaatgctttgcttatgattttagtcgtgattttgatggcgagcgggttcaatccaattattctcgctgtggtattcggattgattattttagccagcaccattttcttgagcacgagtcatgtagcggttgcgggtccagcgtttgtttccgcgttgctaatcatgacgttgcttgtggggctcattattttgactatgacgctcagtcagacagctggctttggaccagaagattcagaaagtcttgaaggcttctctgtttacatcggggttagttttccgcatattttgattgcaacaaccttattaggcacgctgggagccatcgcggaggcggccattgccgtagcggcggggatggatgaaatcaaggatcaagcaagtgatgccggcatcaaacagatggggcatgagattattggcacggcgttaaatacattgttctttggtttttttggcgggttttcatcattgttcatttggtttgcatctttgcgctatccgttcagccaaatcatcaataataaaatctttgttggggagttgttgcaagtcttgatttcggtcattgccgttgttttgacggtaccgatgacaacttgggttgtgacaactcgtcatgcgcatcgcagaaaggaataatatgcagtatttcattgcagacactcatttttttcacgccgatctattaggccaaaacgattttgcaccgcgacttttcccctctgttgaggctatggacacggcaatgatcaatgcttggaatgctcgcgtgggggatcgggatattgtctatcatttaggcgatatcgcgatgaatcctgagcattttccgcaaccaccagaagtgcttggtatattaaaacagctgaacggtcgaattgtcttcattaaagggaaccatgattatgagtcactgttcaagtttcttcatcgaaatgatcctggtgtgaatggacagccaaaattcacgtttcatgatgttggcaccattattaaggacgaccatacacaattcattatgacgcactacccgttgatgatggggattgtcaaacaaacactgaatttacatggccatattcatcacaacagcgtcaatctcgctgagaatattaatgtcggggtagatgcaccggaacgcgatttgttgatgccacacctgccatttgggacaccgctgtccgctgctgaagtgcatgaaatttatcggcttaaggcccaggcgttagcccaaaatcgatgaacaaccgtttgtttgaccgcccgcttatcagagcataggataaaaataagaaagcgcgccggtgattcaccagttagagtatttatttttgccggcacagggaggtttctcgtggaaaagttagtgatcctgcataccaatgatctgcattctcattttgaaaattggccgaagattcggcggtttatgttgggaacacgcgctgcagaacaagcagaaggcgcgagtgtgttggcatttgatgacggggatgcgatggatcgctcagcgcccttaacggaagctacgcaaggtcagatcaatgtgcaattgctgaatgaaattggttacgatgcagcaaccatcggcaataatgaaggtgtcggtaacccgcatgatgtgctggaacatttatacgatcatgcgaactttccagtggcactggctaatttattcgaggttgacggcagccgaccgacatgggctaaaccgtttgtgcgaacgcaaacgcgtgctggtacacgcattgcgattgtcggattcacggcgccattttttctgacatatcgaccaaatggctggcaagttaaaaccgtggcggatgtatttccggatattttgaagcaattatcaggtacctatgacgtgttaattgtgctgtcacatttaggaattgaggctgatcggcacttagcaaaacagtatccagagattgatgtcgtgatcggaggccatacgcatcatttattggcagacggtgagttacatggcaccaccttattaacagctgcagaaaagtatggccattatgtcggcaaagtgacgctgacgctggatgatcagcatcaaattatcacccgtcaggccgagacatttaaaactgagctcatgcaagcggcagctgctgacccgcgtgagatacagggctatgagagcaaaggaattgctttgctcaagcagcatcaggtggcgcggttgcccaaacagctatcgatcaaatatgatgggccttcaccattactggatttaggtttagaagcattggctgatggcgctcaggtggacgcggcgattttaaatgccggacttttccttatgccgctgggtccgggtgttgtaacccaagcggatttattaacctgtttgccgcatcccatgcatctgttaaaagtaacgctgagtggtaaggaactgtggcgcttaatcatggaaatggaaaagaatcgaatgttcctgcgacattttcatatgatcggcatgagttttcgtggaaagatttttggtgacattggttaccgggggattagcgttaatcgtgaaaaacgggttgttctatggcatgggaaaccgttggtgccagaacaacaatatacgtttgtgacggtggacaattttctgttcattccattctttccaagcattgagattatgggcagcaatgaattgctttttcctaagctattacggaatgtggtgggcgagtacttagctcaaaaatatccattatgatttcgtgatatactttgcgaagcatcagcacacataaggaggtgagcacatgggcgaacatgaaccgcttatgcaacaaatcgatgccgcattgaccccagaagctgataaagattcgcgggtggtcattgttaacggtgatttactaacgattgatggtcgccgctatcgccttgttaaggatcaccgaaatgcttttgatgttgcgcgtttgaacgaacgctacaacgaaattcttgataagtatgattatatccttggtgattggggctatgatcagctgcgtttacgcggattctataaagatgatcgacgcggtgtcagcaaagaccagctcatcggcacacttgaagattatttgtatgaatattgtaattttggctgtgcttactttgttttggcgtgtttagacaagtcagtgacaaaagggcagccgcatcgtcgtcagggacatcgtgaggcggggcagagatcagaaacgatcaaaccagtgcatcgccagacacccccaacaaatcggcgcaacagccaaaacaataagcataagccatggtcagcaaaagcggaaaaaccgtatacggaaaaaacaacccgaccaaccaaaattcgcggcgatcaggctaaaactatcaatcagacacaaccacgcaagcgacattttacgattcggcggcgtgagactaataagaagtagggacgaacttgaagtataaaggctatatgatcgatcttgatggcactatctatcgcggtaaggagcggattcccgctgcaaaggatttcgttgaacgactacaggcggcacaaatcccgtttttatttttaactaacaacacgaccaaaagtccagaagatgtggtcaaaaacttagcagagaatcatgatattcatgtccaaccggcgcaggtatacaccccggcactagcaactgcagcgtatctgaccgaccttaatcatggcgatgtgacgggtaagtctatttatatcattggcgagttaggcctcaagcaggcgttgctggatactggattacgattaaatgaagttgatccggattatgtggtcgtcggccttgactatgatgtgacttatcataagtttgaactggcaacactggcgattaaacgcggggcaaagtttattgggacgaatgctgacaccaatctcccgaatgagcgcggtttggttccaggcgcgggctcattgatcgcgctagtggagcgcagcacacagcagcgggctttttacattggcaaacccgaaccaacgattatggagaaagccttgaaaaaaatgggcttacctaaagaagcggttgccatggttggcgataattacaacacggacattaaggcagggctgaatgctggtattgatacgattttagtgtataccggcgtttctacccgtgattatgtttccaagcaagtccatcagcccacacatcagattgatgccttgacggattgggaggtttaacctccatgaagcgtattgctcaatgggtggcgttgtggctagccatcattagtgtccttgtgttcatgacgattttaagtacgctgatcacttttccagtttatgcacacatggatgatctaccgcagattgccgtgatgtcccttggccggctttatcagaattatttgcagctgatggcttacttaaatttaccgtgggttggtactctgcatatgaatgatttccccacaagcgtacatggcgccattcattttgcggacgttcgccacctctttctcttcgatataggggttgctgtggtcacggtcccatttgcggtacgctggttgcatcaacttcgcattgccagaaaaagatatttgttggttcgtccgtttatgattggggccgtggtacctgttgtgttgacggctatattagcggtaaacttcgaccaatttttcatcacgtttcatgaagtcctttttcgcaatagcgactggctgtttgacccggcgactgatccgatcatcaacgttttgcctgaaggattcttcatgttgtgttttctgacagcatttgctttgtttgaagctgtcatgatctggggcatttggcgcgggcgtcaagatgcgaaggtggcatgattggcagcgcaagcaaaaacgcatcgcttgtcacgtggaatttaccacgtgacaggcgatgcgtttttttgatgcaaatcattttgctcagcgttcagtagctttagctgtccgggttttaatggcagcaatgaccatcggtagaagggaaatgatcacgataccgatggcaaccaacgaaaagtgttctttcacgaaggtgacattgccgaagtagaaaccgccgaaaacgcacatggtgacccagaggaaaccgcctaacagattgtaatggataaacttgccgtaatgcattcgggagccgccggaaacaaacggcgcaaatgtccgaatcagcggcataaagcgggcgatggcaatcgtcttaccgccgtgcttgtcgaagaaagcctccgcctgcttcagtttgtcgcgattgatcagccgtccaaaccagccattgccagtggatgctgccgaaccaacgcgcttgccaatttcataattgacggtgtcgccaataaccgcagcagccagaaagacggcgaagagaatccacacattcaggttatacgcggcatttgcagccaacgcgcttgcagcaaatagcaatgaatcaccaggcaggaaggggaaaataacgacacctgtttcgatgaagaccatcgcaaaaaggatggcgtaggtccaagggccgaagctattaacgatggtaatcagatgctcatcaatatgcatgatgaagtcgaacagttgggtcatcttgtgaactcctttaatgaattacagcttattatacggattgatgtgaaaatttcatgaatcctgacagaattttaccaaaacatcaataaatgtcgtcttcaatttctggatgtgaatgagcaagtcgacttgctgcagcagcagcagtggctcccacgatatcatctaaaaaggtgtggataatgccaggctcatgggcgttcagcttagctaagatccctggcttgatgcgatcaatataaccgtaattggtaaaaccaatcgaaccatatacattgacaatcgagaaggcaagcacctcgtcaacgccatataaaccttcatcttcagcgatgattttttgcaacggttcttccaaactgttagcttctgctgccttgtccaaagcaataccagtcatcacagcattttgaacttcacgtttgcgtagaacaatgcgcacattttgtgtggcttcttcgagtgtcagcttggggatgaagcgttcttgcaggaacattacaagttcgccaatatcggatatccgaaccccgcgttcatgtaacagttgaatcgtgcggtcatacaatttttcttcattcgtcatgtttttgctccttgatgggtaaattgcgcagatgagcgttaatgatacaactgagtactgtgcaaggcctgacgtcgatctggatataagcggcttaaggcctcattgatagcggttggcgcttctccaaaaccgctggcaatcaacggcaacttgccagcatagctgacagcatcgccaattgcaaaaatgccgggacgactcgtctgcatttgtgtgtccaccagtataccattacgatccgtgtcaagttgccaagcctgtaggtggtgtttgtcggtgacaaatccataattgatcaacagcttgtcgacggtgagcgttggctgtgcctcgccgcgaacttccttcaattgaatcgctaactgatcatcttgaggggtgactgattcgatcaggtaaggcgtctggattgtcacactgcttttttcaagtgcagcaacactggcttccaagccgcgaaatttggcacgacggtgaatcagactgacatgtttggcaaccggttcaagtgccagtgcccaatcaattgcagaatcaccaccaccagccacggccacttcctgatcccgaaaagtttccaaatcctgcacgaagtagaacagttttttgccttccaatgccggatcatagtcaacagctaacttgcgcggcgtaaaagcaccaccaccggttgccacgatcacagtcttactgcggaaatcgccttgacttgtatgcaatgtgaaaaagccatctggatcttgatcgatcgtctgtacttccgtagcggtcttgacttcaggatgaaaatgcacgagctgagttttgagctgcgtgacaaggtctttgccactaacatgcgggaatccgccaatatcatagagaattttggcagggtataagttgcctgtttggccgccaagctcgtcaagactctccaataacaaaacgtctgcctggcgcaaacccgcataaaaagcggcgaacatcccaaccgggccgccgccgattaccgtgatttcatatacatgctgcactgacatttgcaatgctccgtttctatatagtatgacgtgcatacactaccatattttcacgataagtaccaaaataggctgaacaccggtctgtcaagtgtgattagcccgtaagcagcctttttaatagacgatcgttgcatcagcaagcctgtgtagtttgcgctcaggggctgggctggtatactacgcctagtacaagaacgttaacttgtaaaggagattgatcatggattacccacaattagaactcaaagactttaagggaccaaaagcgatttttgaaacaagcgaaggtcgctttgaaatcgcacttttccctaaacaggcgccaaagacagttgaaaactttgtaggccttgccaaaaaacattattacgacggtttgatctttcaccggattattgatgatttcatgattcaaggcggcgaccccaccggtaccggcatgggcggtgaaagtctctgggggaagccctttaatgatgaattttcaaatcagctattcaatttgaaaggtgcactttcaatggccaatgctggtccaaatacgaatggcagccaattcttcattgtgactaatgcgcatttagacccgagcatgcaggcgcaactaagtgaggctggattcccagaacccatcattgaagcgtataaacaaggcggtacaccgtggctcgatcatcgccacacagtctttggccaagtcctaagtggcctgtccgtggttgagaagattagtaaagtcaaaacaggtgctaatgataagccggttgaaccggtcacgattgatcaggttacgattgaagactaatattggtcggcaatgatttttagggtatactcaaagagaaatccaatgaaatgaagtgtcagaatggaatatcgcataggagatatcttgactggcaaagtgacaggcgttcaaccttatggcgcgtttgtcatgcttgatgagcacacgcaaggtttagtgcacatctcagaatgccagcatggttatgtcaaggacaccagcgatatttttaccgtcggccagcgagttgaagttgtgattttggacatcgacgaatatacccaaaaaatcagtttatccttacgtgccttacaagcgtcgcctagaatgagtaaaaagcgtcgccgcaagcattattggaccagtcgtaaatttcacacaggctttgcaccgattgccgctcggttagacgggtgggtcgctgaagcacttgatcatttagacgaagaaccggctcacaaatgagccggttcttttttctgaacttttgtcacgatgaatagaataatgttcgcagaaatgctgaatttttatgcaattctggagaaaacgttcgcgatctttcggtattttaaaatgtttcaatttgcatgaattttttattgactacatcgttaaagtgctggtatgatacttgttgttgtcaaaacaaaaggcgctgatctttagcggatatacttaattagatcaagttgatggcttgcgcaatgtgcgacgtcgagaacagatgaataaatattcaatgtttaaaaagacgttgacatgtaacgctggtcatgataatctatcaaagttgtcttttgacaaggtcgtcctttgaaaactgaacaaagtttcgtttaaatgtgcagggtccttggtactttggtaccgaggcaaaaagtaacatttgcgaagtcaattcgctagaacaacaaatcgagctattcgaacagctcatatttatatgagagtttgatcctggctcaggatgaacgctggcggcgtgcctaatacatgcaagtcgaacgagttctcgttgatgatcggtgcttgcaccgagattcaacatggaacgagtggcggacgggtgagtaacacgtgggtaacctgcccttaagtgggggataacatttggaaacagatgctaataccgcatagatccaagaaccgcatggttcttggctgaaagatggcgtaagctatcgcttttggatggacccgcggcgtattagctagttggtgaggtaacggctcaccaaggcgatgatacgtagccgaactgagaggttgatcggccacattgggactgagacacggcccaaactcctacgggaggcagcagtagggaatcttccacaatggacgcaagtctgatggagcaacgccgcgtgagtgaagaaggctttcgggtcgtaaaactctgttgttggagaagaatggtcggcagagtaactgttgccggcgtgacggtatccaaccagaaagccacggctaactacgtgccagcagccgcggtaatacgtaggtggcaagcgttatccggatttattgggcgtaaagcgagcgcaggcggttttttaagtctgatgtgaaagccctcggcttaaccgaggaagcgcatcggaaactgggaaacttgagtgcagaagaggacagtggaactccatgtgtagcggtgaaatgcgtagatatatggaagaacaccagtggcgaaggcggctgtctggtctgtaactgacgctgaggctcgaaagcatgggtagcgaacaggattagataccctggtagtccatgccgtaaacgatgaatgctaggtgttggagggtttccgcccttcagtgccgcagctaacgcattaagcattccgcctggggagtacgaccgcaaggttgaaactcaaaggaattgacgggggcccgcacaagcggtggagcatgtggtttaattcgaagcaacgcgaagaaccttaccaggtcttgacatcttttgatcacctgagagatcaggtttccccttcgggggcaaaatgacaggtggtgcatggttgtcgtcagctcgtgtcgtgagatgttgggttaagtcccgcaacgagcgcaacccttatgactagttgccagcatttagttgggcactctagtaagactgccggtgacaaaccggaggaaggtggggatgacgtcaaatcatcatgccccttatgacctgggctacacacgtgctacaatggatggtacaacgagttgcgagaccgcgaggtcaagctaatctcttaaagccattctcagttcggactgtaggctgcaactcgcctacacgaagtcggaatcgctagtaatcgcggatcagcacgccgcggtgaatacgttcccgggccttgtacacaccgcccgtcacaccatgagagtttgtaacacccgaagccggtggcgtaacccttttagggagcgagccgtctaaggtgggacaaatgattagggtgaagtcgtaacaaggtagccgtaggagaacctgcggctggatcacctcctttctaaggaaacagactgaaagtctgacggaaacctgcacacacgaaactttgtttagttttgaggggatcaccctcaagcaccctaacgggtgcgactttgttctttgaaaactggatatcattgtattaattgttttaaattgccgagaacacagcgtatttgtatgagtttctgaaaaagaaattcgcatcgcataaccgctgacgcaagtcagtacaggttaagttacaaagggcgcacggtggatgccttggcactaggagccgatgaaggacggaactaataccgatatgcttcggggagctataagtaagctttgatccggagatttccgaatgggggaacccagtacacatcagtgtattgcttgtcagtgaatacatagctggccggcggcagacgcggggaactgaaacatctcagtacccgcaggaagagaaagaaaactcgattcccatagtagcggcgagcgaagtgggaagagcccaaaccgagaagcttgcttctcggggttgtaggactggacattggagttaccaaagtccgacgtagtcgaagtcagctggaaagctgcgccacagaaggtgaaagccctgtaagcgaaacgtcgaaccctccgtccaggatcctgagtacggcggaacacgtgaaattccgtcggaatccgggaggaccatctcccaaggctaaatactccctagtgaccgatagtgaaccagtaccgtgagggaaaggtgaaaagcaccccggaaggggagtgaaacagttcctgaaaccgtgtgcctacaattagtcaaagcccgttaatgggtaatggcgtgccttttgtagaatgaaccggcgagttacgtttgcttgcgaggttaagatgaaaagtcggagccgtagcgaaagcgagtctgaacagggcgaatgagtaagcagatgtagacccgaaaccaagtgacctacccatgaccaggttgaaggtgtggtgaaacacactggaggaccgaacccatgtatgttgaaaaatgctgggatgagttgtgggtagcggtgaaattccaaacgaacttggagatagctggttctctccgaaatagctttagggttagcctcggaggatggatcatggaggtagagcactgtttgaactaggggcccatcaagggttactgaattcagataaactccgaataccatcgatcttactccgggagtcagacagtgagcgataaggtccattgtcgaaaggggaacagcccagatcaccagttaaggtccctaaatttatgctaagtggaaaaggatgtggcgttgcacagacaactaggatgttggctcagaagcagccaccatttaaagagtgcgtaatagctcactagtcgagtggcactgcgccgaaaatataccggggctaagcataataccgaaactgtgggtgcacccgtaagggtgcgcggtaggagagcgttctaagggcgttgaaggtcgatcgtgaggacggctggagcgcttagaagtgagaatgccggcatgagtagcgaaagatcagtgagaatctgatccaccgtatgactaaggtttcctggggaaggctcgtcctcccagggttagtcgggatctaaggcgaggccgagaggcgtagtcgatgacaagcaggttgagattcctgcactagtttattttgtttaagcgatggagggacgcaggaggctaaggaaagcgcacggctggaaatgtgcgcccaagcaacaagtctgacagcgagtgaaatgcttgcagtcttaaggacaagctgtgatggggagcgaaattatagtagcgaagttcctgatgtcacactgccaagaaaagcttctagtgagaaataaactacccgtaccgcaaaccgacacaggtagtcgaggagagtatcctcaggtgagcgagcgaactctcgttaaggaactcggcaaaatgaccccgtaacttcggaagaaggggtgctgaccgcaaggtcagccgcagtgaataggcccaaacaactgtttatcaaaaacacaggtctctgctaaatcgtaagatgatgtataggggctgacgcctgcccggtgctggaaggttaagaggatgagttagcgcaagcgaagcccagaattgaagccccagtaaacggcggccgtaactataacggtcctaaggtagcgaaattccttgtcgggtaagttccgacccgcacgaaaggcgtaatgatttgggcactgtctcaacgagagactcggtgaaattatagtacccgtgaagatgcgggttacccgcgacaggacggaaagaccccatggagctttactgtagcttgatattgagtgtttgtaccgcttgtacaggataggtaggagccgtagagatcggaacgctagtttcgatggaggcgttggtgggatactaccctagctgtatgaacactctaacccgcgccactaatcgtggcgggagacagtgtcaggtaggcagtttgactggggcggtcgcctcctaaaatgtaacggaggcgcccaaaggttccctcagaatggttggaaatcattcgcagagtgtaaaggtataagggagcttgactgcgagactgacaagtcgagcagggacgaaagtcgggcttagtgatccggtggttccgtatggaagggccatcgctcaacggataaaagctaccctggggataacaggcttatctcccccaagagtccacatcgacggggaggtttggcacctcgatgtcggctcatcgcatcctggggctgtagtcggtcccaagggttgggctgttcgcccattaaagcggtacgcgagctgggttcagaacgtcgtgagacagttcggtccctatccgtcgcgggcgcaggaaatttgagaggagctgtccttagtacgagaggaccgggatggacgttccgctggtgtaccagttgtgccgccaggcgcatcgctgggtagctatgaacggcagggataaacgctgaaagcatctaagtgtgaagcccccctcgagatgagatttcccattcctatatggaagtaagacccctgagagatgatcaggtagataggctggaagtggaagtgcagcgatgcatggagcggaccagtactaatcggtcgaggacttaaccaagtaagcgtgcaagcaggcgcaggtttctgcgactgcgaacacgtttcgatgacaagtacgttaggttcaaggcagcaattaaacaatgatagccagttttgagagcgcaaagttctcataagtgtggtggcgatagcaagaaggatacacctgttcccatgccgaacacagaagttaagcttcttcacgccgagagtagttggtgggaaactgcctgcgagggtaggaagctgccacgcttacatatggaggattagctcagttgggagagcgtctgccttacaagcagagggtcacaggttcgagccctgtatcctccattgagccgttagctcagttggtagagcaactgacttttaatcagtgggtcgacagttcgagcctgtcacggctcagagaattattggttttaaatggcggctcaagtcgatttttcgccgacttagctcagttggtagagcatctgtcttgtaaacagggggtcgaaggttcgaatcctttagtcggcatggtaccaataatttgatagcaccatgtttcatgcggaagtagttcagtggtagaacatcaccttgccatggtgggggtcgcgggttcgaatcccgtcttccgctttccaagcacagtgccgagggtgtgcttggtcaaacctatcctcggcattatcatgatttgcacccatagcgcaattggatagagtgtctgactacgaatcagaaggttgtaggttcgactcctactgggtgcattatcgggaaatagctcagcttggtagagcacctggtttgggaccagggggtcgcaggttcgaatcctgttttcccgattggacatttttgtcccttagtttttcgcggtgtagctcagctggctagagcgtccggttcatacccgggaggtcgagggttcgatcccccccgccgcgattgagcttggacctttagctcagttggttagagcagacggctcataaccgtccggtcgtaggttcgagccctacaaggtccatctttacagggtggtcgctgttcggtataatcgatatgttattgttatcgcgggatggagcagttcggtagctcgtcgggctcataacccgaaggtcgcaggttcaaatcctgctcccgcaatttatatggttccatggtctagttggttaggacgcctgcctgtcacgcaggagatcacgggttcgagtcccgttgggaccgtttgcggctcggtagctcagtcggtagagcaatgcattgaagctgcatgtgtcggcagttcgattctgtcccgcgccatattcataatcatttttatgcgggtgtagtttagtggtaaaaccacagccttccaagctgttgtcgcgagttcgattctcgtcacccgctgcggttatgatcatgggcctatagctcagttggttagagcgcacgcttgataagcgtgaggtcggtggttcaagtccacctaggcccattgttccatttatagtttcatatacacatggagaagtactcaagtggctgaagaggcgcccctgctaagggtgtagaccgggaaactggtgcgagggttcaaatccctccttctccgttgtggcccgttggtcaagtggttaagacaccgccctttcacggcggtaacatgggttcaaatcccgtacgggtcatgtttagatggagaattacccaagtctggctgaagggaacggtcttgaaaaccgtcaggtgggcgtaagtccacgcgagggttcgaatccctcattctcctttataattatcgcgggatggagcagttcggtagctcgtcgggctcataacccgaaggtcgcaggttcaaatcctgctcccgcaatttatatggttccatggtctagttggttaggacgcctgcctgtcacgcaggagatcacgggttcgagtcccgttggaaccgtctctctcaattgagagaaaaatacaaaagtttagttccaaatggctcggtagctcagtcggtagagcaatgcattgaagctgcatgtgtcggcggttcgattccgtcccgcgccattatggaggagtagcgaagaggctaaacgcggcggactgtaaatccgctccttcgggttcataggttcgaatcctatctcctccattttatagggatatagtttaatggtagaactacggtctccaaaaccgtcagtgtgggttcaactcctactatccctgcttttataatggcggtattggtgaagcggttaacacaccggtttgtggcaccggcatacgtgggttcgatccccacataccgccctttttactggggtatagccaagtggtaaggcaacggactttgactccgtcatgcgctggttcgaatccagctaccccaatttctccaactgccataggggaaaggcacttaattgaaatatggcggtgtagccaagcggtaaggcatgggtctgcaaaaccttgatcgtcggttcgattccgatcaccgccttatcttgcggcaatcgccaagagagtgtattatcatttaatattatgccggtgtggcggaattggcagacgcgcgggattcaaaatcccgttccagcgatggagtatcggttcgaccccgatcaccggtatcacaaaccttcctaggaaggttttttttttgccttgaaaatctgtgccacaaacaaagatgttcccaatacatttgtaagcgtcacatagtgcagtacctataattgtcaaaatcctccctctatacttggtctatcaagaagattggaggatttctttatgactcaaaccaatgatctggttccaatccaaatggtcaatcgcgacggtgccgccgtcgtggtgaaacccaaactaggagccaaaattaaactaaacgaagccgaagtccttttctacaatggcatcgataaggtgatggcccggattattttgcaggagttgatggcccatgatacccgacctgtccaaagctaacatttacatcatttgcggtcgcaccgatctgcgaaaaggcattgatggcttggcggccttggtcacggaggagtacaagatggatgtgttcgacaatgcgttattcatcttctgtggtacccgtaaggatcgtttcaaagcactgtattggaccaaaagtggttttctgcttttatacaagcgctttgaaaacggctatatgcaatggccgcgcgatcgcagtgaaattcgccgtttgaattatcgtcaaatgtcacgtctggtcaatggtttagccattgaagaacgccgtaccattcagcctgtaaccccggggtatgtgtactgattgtctgaaagaaagtcttttcttgaagctgacgaaaaggctttcttttcgtgtggccgcttgatatacttttttcaaccattttaacggagggcgcgagatgtcagcggaagcagtcgtgacgacagaacaattcgaatatctcaaacaagagaacgcgctgcttcgcgaacaagtcgagttcttaatgcggcgcctgtacggcactaagcgtgaaagtctcactgacggtcaggttgatctctttgatcaaaccaaaacctttgtggcgccaacagttcctgaaccagaagagcaagatgacaaacctgcaaaacgtaaaaaacaaaaaggcaggaaagcagcgcaactggctccttttcctgaagtggctgtgcaccacgaactaaccggagcggaacgccagtgcccacattgtgccgctgagatgcgtgaaattggggccacggcgaccagccgcgaaccggttcggattccggaacacgttgaagtccacgtccactatcagcacgcctatgaatgtcgccagtgttccaatcagttagatcacagcgtcatcaaaaaggcgatagtgccgaagccgttcattcctaacagctttgcctcaccaagcatcctaacccaaacgatgatcgaaaagtatcgtaaaaaggtcccagcctatcgccagataaaggattggggagacttggggctcgaactaacccgccaacaaatcaccaactggcacattcgggcttgtgactatgggttaggcaatctctacgaactgatgcatcaaacactgctcaaacaaaccgtcgtccacgccgatgaaaccagctatcgcgtgttggaaagcgagaaagtaaacacctatttctgggttttcgcctctggacgcgcggaagacgagcagattattctctatgagcacgccgattcccgcgccacggaagtcccgaagaacttcctcaacgggtatacacattatctccaaaccgatggctatcaagtgtacgacaaacttgatcaggtcacccgagtcgcctgtctttcccacatccgacgtaagttcttcgaggccatgggtaaacagggcaacacgcaaagcggtgccaagaaaggtgtgacatattgtgatcgcatgttcaagatggagcggccatggcggttattaacccctgatcagcgctatcaaaaacgccaaagtcaactgaaatcaactatgtccgatttcttcacttggtgtgaaagtgtccacgccttaccgcaatccaaattcggccgcgccatcgactatgcactcagtcaacgcgaagccatggaaaatgtgttgttggatggccgtttggagctttcaaataaccgcgttgagcgcgccgtcaaggaactcgttatcggtcgcaaaaactggctattctccacgagtttcaaaggggcccggtcaagcgggattatcttgagtgtcatgcgttcggctgaggccaacggtctcgactgccgcaaatacctcgaatacttatttactgaattacccaacctttccgttcctggcgattctaaagcgctgcaggattatttaccatggtcgtcgcaagtccgggtaatctgtgcaagataaacctcaataaaagacaacggcttcggcatttcctcaatcataagggaatccgaagccgttttaaatgtacctcacaatcgtgcgcttacatacatttttgatcacacccgatttaaaaaagtgtacaatttggcacaaatcatggagccgctgtttttgcatgaaaattgtatgatttctgacacacgaaaaaaagacccagcgtttcttcatcctacgtaaaagtaagatgctcctgagtcttttttcgttatctgatactgtcctttttgacgattgctgccagttgacttgctattcttcgcgagagaacttcaatatcttgatccgagaccgttccaatgcgcgacgatgacgctgcagcaaaggatcttcagaactgtctgtctgactgatgacagctgcctcgaaggcctcatattccaaaggtgacaaccgtgccagaaactgtgcaaactcgattcgcatgagtagaccatcttcatacgatctgagagccagacgttcttgaagagattcaagtgcgctgtcttcaactgggattgcggtcgcgtcgatgcggcgtttatgcgcaaagtgtttccgcaagactgaacgcaggtgtgactgcaataccattcgatagtagggaccaaattgggatccgctagagccatcatatcgagtaattgctttgagcatcgcaatcctggcctcttgtaaccagtcttcatgtgaaaaatccctgagatggtacggtcttaacaccgttaggactagcggtcgatattgcttaaacaattggctgaatgcagttgagtttgtgattgcttcattgattaatgttaactctgtggctttcatatctcctcctcccccgacttactagctttttcattctacaataaagcgtttccaattgaatagtgaacaatcgttcatgaatattttttaggggaacagaatgcttacaaccaaaggcatatgttggggcaatattgacaacattattttagtatttttttcacgatttttttaagagtcacgacatctttaaaggaatagaaaggggccagtagaatgacctattgttaattggtgattcggtggtcggagagcgtgttattacaagcatgatttgaaaaatggtatgacaaaaaatgatgatattttaatggcgtgaaggcagctttagatatcttagaacggcaatttttaaaaaataatgttggcgccttcatatgcgataccatcgggaaaatagcgaatttataaagaataatcaatcttacattgatcatgacatgcgttatattaaacaagtcacttttttagggaggtattcgataatttcttcaaatagagaaaataataaaattggtctatttcagttagttatgctagctttgggttccttgattggttcaggctggctctttggttcttgggaagcagcagcagtagctggtccggcggcgattctgtcttgggtgattggcggcttgattattggcatcattgcttataattacattgagcttgggaccatgtttcctgaatcaggcggaatgagcaaatatgctcagtactcgcacggttctttagttggctttatcgcctcttgggccaactggatctcgctagtgacgttgctgccgattgaagcagtggctgccgtgcaatatatggcatcatggccgtggcagtgggctagctttacgcacggtttttggctgatgggcgtatcacatcgcaggggttgctggtggtgtttgctttcatcattatttttacgttacttaactattggtcagtctcattactgacacgattcacgagcttcatctcgatcttcaaaattggggtgcctttgctgacgatcacgctgttggcactttcaagcttccatcccggcaattatgggcattctttagcgaccttcatgccttatgggagcgcacctatctttgcggccacttcagtttctgggattattttttcctttaacgcgtttcaaaccgtcatcaacatgggaagcgatgttaagaaaccgcaaaaaaatattgggcgcggaattgcaatttcgttactgattagtgcggtcatttacattttattgcaaagcgtttttatcacgacaatttcgccgaagctattagcagcacatggttggcaagggttgaatctcaactccccatttgctgacttggcgattctgctgggcattcactggttatcagttttgttatatatggatgcctttgtttccccgtttgggactggcgtttcatttgttgcttcatctgggcgggcgttgcaggcgatggtcagcaacaaccatattcccaaatttcttgggaaacttgatgaaaagtatggtacaccacgagtggcgatggtggtgaatgcgttgcttagcatggttatggtttcgatttttccatcttggggtacgttagctagcgtcatctccacggcaacgttgattgcttacctgacaggtcctattacggtcatctccttgcgtgacatggccccagattttaagcggccagtgaagtcgagcctcttgcgggtgatggcaccattgtcatttgtgctaacctcattagcggcttactgggcaaaatggccgacaacggttgaagtgatcggcgttattttcttgggtattcctttctatttgttctatgaatggcgatcaggctgggcaagcacgcttaagcaattgaaggcggcagcttggatgctggtatatttgctattcctgtcactcatctcacttattggcagcattgagtttaatggtttgaattggattcactatcctttagattttgttgtcattatcgttggtgctttgggcttttatgcttggggaattaatagtcacattttctctaaatatttccgacgcgctgcaagggtgaatgacaaagttaaaatgccgcggcagtagcaactagtattagaaaaaacacgtctctggtcagaaacatgatcatcgacgtgttttttggtatgatggaagacattctgattcttgaccattgccgcagatgctttgagccgccggtggtgaaggctcgtttgataaaatgctagatggcataacttacgacttttgcctgatgatggtgtgatggcgacaaggtaagataattttaaaggtttgagggaaaattgcatttagctatgcctatctttatacttatactaaacaaatgacgtctggaggggattaggtgaatatcgggatttttacagatagctactttccacaagtcagtggcgtcgcgacgtccatcaagaccttgaaggacgatctggagcgtaagggccatcaggtttatatttttacaacgactgatccgcatgtgccggacgacgccgttgaacctaatttattccgatttaccagtgtaccgtttgtctcattcacggatcggcgaattgcggttcgtgggctttttcatgcttacgcagtggcgaaggaattgaacttggacattgttcatacacaaactgaattttcgatggggtatatcggcaaatttgtcgccaagcagttgaaaattccgacaatccatacttatcacactatgtatgaggattatctgcattatgtcctgaatggtcatttgctgaagccttatcatgtgaagcagtttacgcgggcgtttctttatcatgtcagtggcgttgttgcgccttctgaacgcgtttatgatacgctgcggcgatatggcgtcaaaactgagatcaaaatcattccaactggggttgatttgactcagtttgcccagcaaaaagatccgcatttacgtgacaagctcgggttggcgcatgtcccggttttggtctcactcagtcgggtcgcgtatgaaaagcgaattgataaggtgatcagtgccatgcctaaaattctggaacaggtgccccaagcggtgctgttaattgttggcgatgggcctgcgcgtgaagacttagaggcgcaagtcgctgagctgggtctcaaggagcatgtccgattcaccggtgaaattgaccatgatgatgttggtgactattaccgggttggcgatgtgtttgtatcggcaagtgactccgagtcacaggggttaacttatatcgaagcgatggcggcggatcgcaaagtggttgccttgacaggggattatacggatcaacttttggatgatccggcgttagggacaacattttcaactgagactgaaatggtgcatcaggtcgtgaattacttgaaacatccaaatgcttacgatgatgctaagccgcgtcaagaaaagttagcggcaatttctgcagatcgatttggcgatcgggttttggatttctatcaagacattttgtcacactattcgcctaatgaggccgatgaagctgcaccatggaccgatgaagattccagtaaacggaccatgaaaggttaaatatgattgttattaatatgttttcctctgccaataaggttgcaggacaaggagttggcgcagtctacacagaactgatgggcttgctgaaacacgatttttcaaatgaatttgaagttaacgtcaatcgttatacgcgtagtgacatcagccattatcatacgattgatcctaaattttatttatctactttctccaaaaaacggggtcgcaagattggctttgtccactttgtgccgagtacactggatgcgagtctgaagttgccgcgagtggcgcggtggacgcttgataagtatacgttggctttttataagcgaatggatcagttagtggtggtgaacccgaattttattcctaagttagaagcttatgggatcagtcgcgacaaagtgacttatattcctaatttcgtatcgcaacgaacgtttcatccagtatccactgaaaagcggcaggctttgcgacatgccaatggctttaaacctgatgattttgtcatttttggcgcgggtcaggtgcaggatcgtaagggtgtcagcgactttatcaaattagcaaaacaaaatcctgaatttcgttttgtttgggcaggtggtttctcttttggccgcattactgaaggctacgaccatttgaagaaggccgtagcagaagccccggcaaacttggattttaccgggattatgccacgggagacaatgattgactattacaatatggccgatgttttcttattgccttcttatgaagagctgttcccaatgtccgtccttgaggcttttgcaacgggaacgccagtgatggtgcgggatcttgagctgtatcaccaaatcatcacaccttatgccatcacggctgttgatgttgacgatatgcagtctcgattgcgggcacttgcggatgatcatgatcttttggcaacttatgcaactaagagtcgacaagctgctgaagtttacgatgaaagccgacttgaaaaagtctggcacgatttctatcttcatcaagctgcacgggggaagcactagccgaggagttatatgacacggaagaacaaactggctgtcttaatcatgattttgattggcgccggtatttttatttatgaagctcgtgatctgaacggcgcacaattaatccacgaactattgacgcttgatctcaagtggctgctggtggcttttttgctcatgtttgggtcgtggatcattgaaacctttgtggttcagatctttattcgaagtgaagctgatgatttagactttaaaaccgctttgcgtgtgccgttggttgaacaattgtttaatgcaattacgccgatggcttctggtggtcagccagcccaattatttgctttgatgcaaagtggcgttgaagctggccgggcaagttccgtgttgttgatgaagtttgtcgtgtatcaattcatggtcctgattaactttgtcctgacactattcatcgggtttgatcaggtgtccaaacattttggggcgcttgctttgttcatcgtttttggttttgtgattcatgtggttgtcatcgtaggcttgctcatggtgatgtattactataagttcacaaaaaaattagtgaatttggtgatgataccgattggctggtttgtcaaacctgagaaaaaacttgccatgcaaagtaaccttgatcataaaattgacactttttacgcagagagtttgcacttgaaacgcgaaaagaagcgggtcatcaaggcttgcttgttgacacttgtgcaattgctgctttactatgcggtgccgtactttgtgctcctgtcgcttggcgtaagtcatgttagtatcgttgaggtcatcgtgttgcacgtgatgattgtgatgattgtcagcctgtttccgattccaggcggtgctggcggggccgagtatagctttaaaaccttgtttgcgacttatgttgcgtcgccttcaaaattgattctagggatgctgttatggcggttcttgacctattacctggggatgatctgcggcatcattgccatggcattcccgccaaaaagcaaacgtacgtgagcgactgagaaaagtcaaagctcagggagggcgaaatgtcgtcagcaagcgaagaactgaaccagtattggcctgcctttagacaaagcaaacgttatgcgcctttgttagggatcggagacgccgagattaagcatatcttgaccggcatcgttgaattggtgatggctcaaaatcagcatcacattaaggcgtggcaaatcaacgaaattgctgttgccctgagacctgctttggagactagctgggccaccccaaaacaggagcagcgaattttggcacgatatgcttcgtgggtgaatatttttttaacatggctggcagaagccggtaaggtcgcatttacatcggcagacgttgctgctgtgatggcgatactttatccgtaagctacatgtcgataaataaaaagcgcttggtaatcagaccaattttgatctgataaccaagcgcttttatctattgtcttcaaaactaggcggctttatgcgcagctatgaatgcttgtaaacgtttgactgcctccttgaggtcagccatggaagccgcatagctgatgcgaatataaccttcgccaccagggccaaacgcggtacctgagatcagcgcaagtttctgctctgtggcaagcgattgcgtgaattgtcgcgaatcaagccccagttcgatcgggattttggcaaaaagatagaaggcgccatccggccgagcaacatcgaagcccatgtccagaagcgcctgatagacaaaatcgcggcgcttggcataggcggctttcataacctgtgcatcatcttgtccgttcgtcaaagcttcaatgccagcgcgttgtgcaatggtggttgccgcggtgacgagatactggtgcacttttttcgcctctgcgatcaaaactcgcggacccatcaaaaaaccgattcgccagccggtcatggcatgtgattttgacagaccattcacgacaaaagttcggtcgtaagcataactgcccatggaaacatgtgagtcaccataagttagttcggaatagatctcatcgcaaataatataaagatcatgttcagcagcagttgcggcaatcgctttaacctcagacgcacgataagtgacgccagtcggattgcttggatagtttaaaatgatgccttttattttggcatcaggatgagcagcaatcgttgcttcgatcagcgctggggtcaagacaaagttggttttgctagtgtccatatagatcggtgtcacatgattcaacgtaagcaaagggatgtaccccggataaatcggtgacggcaccagcatggcatcacctggatcgctgatggttgtaatggcagttgccaaagcctcggtagcgcccacggtgacaaggatttcatcttcagcagcgtaatcagtatcatattttgttttgaaaaagtgttgcgcagcttcccgcagttctggatcacccaccattccggtataatgagaataattttcctgaatagcttcaatgccagcctgtttaacgtgctcaggcgtattgaaatcgggttcacctaacgttaacttcaaaataccgggaatcttgctgacgctttcgtcaaattgccggatttcactaacgtcgatgtcggctaattgtttatttaatggttgcaacttcatgggcgatctccttagtatgtaggttgcaaatagcatagtccattttccctcatagttgcaatgcaataaaactgcaattcaaagagagatttctcccacagaggccgtggtttatgctaagctatttcttgaaataggaaaaataaacagcgcgtgatcccgcccagatgagattcgatgtgtcagtgccaataattggcatgttggctcgcaaggtggtgatcgcgtttataggaggccattttatgaaacaatcacagctcgtggccatcatcaagcgcctagaagccatgcaggcaggcgatggcgagacccagtcgcgccgcttcgaaaaaaatggtgatgaaaagggcctcgtgacatacgatcccaagaccgaaacttatgaacttgaagaattaggcactcaccaaacctttcagtttgataatatcgatcttgcagccatggaaatctatgatttgatggattttgatgaagacgatggcacaagtgacagcaccagcgatcaagcaccagcttgatcaacgacaaaagcgaactgacaaggttcgctttttgtgtagcacatgatcagaagcgcttggaaatggtattcagtagccgtcaaaacctgatccgaatttaaaggcttctttaaaatcaccatggattggcccaaataggtccagaaagtttgtctttttcaaaacaagcggttatcctagcgaatgtgctatacttttgacattaaacaatgacttggaggctccacatgaaccagcttggcagtaaactcaggggattttataatacccggctcgggttttttgtgcttgccatcgtccttttttgggcgaagacatactgggcatatcaatcaaaattcaatctgggcgtcaccggcagctttcaacatctgatcttggcgatcaacccgattccaaccacactgttcctttttggcatcgcactatacatgtcagggcgtaaatcgtacattacgatgctgattattgatgcacttacatcggtgtggctttttgccaatgtcctttactatcgagaattttcggactttctgacatttgcattgatcaaagggtcaggcgccgtgtccaataacctcaataaaggcatcatgggtattgtgcaaccaacagattttattgttttcgctgacgtcctcattttgattctgttgcttgtttttaaagtcattcggatggacattcggccgattaagaaacgctttgcgctcggggtttcggttttagctgtcgcgatgttcgcagctaatctcagtatggcttatagtgaccgttcaggcttactgacgcgtacctttgacaataactatattgttaagtatttaggccttaatgcctatacagttgttgatggggtcaaaacagcacaaaacagtgccacgaaagcaaacgctgattcaagcgatgtgaaatctgttttgaattatcttaataagaacagagtcacacctaatgcgcaatatactggtgttgccaaagggaagaacgtttttgtgatccatttggaaagccttcagcagtttatgattgacttcaaatgggatgggcaggaagtgacgcctaatctaaataagctctatcatgaatctgatacgttatcctttgacaatttctttaatcaagttggccaagggaaaactgccgatgctgagatgatgatggaaaactcactgtttggtttacctgaaggggcagccatggttaccgatggcacaaccaatactttccaggcagcgccagcaattttggatcagcaaggttacacaacagcatcattccacggcgatgtgccgagtttttggaaccgagacaacacctataagtcttggggctatgactacttcttctcgaaaaattatttttcaagtgggaagaactacgatgtcggctatgggctaaaggataagattttcctcaaagactcagctcagtacattgagcaattaccacaaccgttctatgccaaaatgatcacggtcacaaatcactatccgtatactttggataaagccaatcaaaccatcgagaagacggatactggcgacgataccgttgatggctatgttcaaactgcccgttatcttgatgaagcactgggtgagtttttcaattggttgaaggaaactggtctgtatgacaaatcaatgattgttctttacggtgatcactatggtatttcgaataaccataaaaaagccatggctaagcttacgaacatttctggtttcaatgattataacaacgccatgtaccagcgagtaccatttatgattcacatgccaggcttaaaaggtggtattaatcatacgtacggtggtgagattgacgcactgccaacaatattgaacctgttaggtgtgaaagataacgatacagttcaatttgggtccgacttgttatccgcggatcatccgcaaaccgtggccttccgaaacggcgactttgtcacgccagactttacaaaggttggtagtcaatatttcaataccacgactggtaagaaaatcgacaagttatcagaaagccagaaggaaagtgttgatgcgtccactaatcgagtgaccaccgaactttctctgtctgatcgcgtcattaacggcgatttgttgcgattctatacaccggccggctttaagaaggttgatcgaagtgacttttcatataagctgacagatacaaagaaaaagttgaaagccgcgcaaaagaagggcacgagtctaaaagcggaaaacaaaggtaagtcagttgccgatgagtataagaccgatgcacccgaacttaaagacgatagcgatagcagcagtagcgagtcaaagtagcaatcgaattcattgaaagcagcgttcagcggcgagcgctgctttttctggctctacgtcaactggtgttgaagaataaatttatcatttgaggcggttctccatttggggagccgtctttgtcatgttatgccgtgatttggtagattcgtttgaagaagttcagctgattcttgaagccaaaacaggatcgtttgagtgacttgatgaggcggttaaccccttcgatcggaccgttggaataagggctggtgacagcggcgagaacagcgactttgtgtcgcttaagcgtcgcgatcgtcatgtccattgccgtaccgtttggctcgtaagtagctaacaggtttgccagttccgcgggatgtttcttcaccatcaaagcatcatgaagcgctaagtaggtctcgtaggtttgcttgagcttgggctcagtatcaagtgcgatatcgatggcctcctgttgcgtgacgtattcattcaaaccaaacaggaactgtttgtgtttagcgtcaggcgcagtttgatgaaaaagccgccagtttgtcttcatgatcttataaggacggctgtgtttgtcatcaagctgtttgagcgcttggacgcgtacctgatcaagggcacgagccgcaagttgaatgatatggaaccgatcaatgacgacttgggccttggggaaaacctcatgaataatcgtctgataagctgcattcatgtccatggtgaccgtctggacccgagtgcggtcagcgagtgaataatgagcgatgaagaagtttttaatcgtgcggttgaatcgatcaccaagcaaggcaatcagacgatgtgaatcggcatcaagacagataaacgacatcatgccatgagtggaacggaactcatcaaagcagagtcgcgtgggtagccggcgagccggtcggagtttgagattttggtcaatgatccgttgaaccgaggaggctgagattccgataatacgggcgatggttttgactggcaaccgttcatgcgctaacttcatgattcgctctgtcatgtgagcggcgatcgtgtggttgggttgcacgagtggcgtcttggcactgactgtgtggtaacagttatgacagcgccatcgttgcttgtgcaagtcaatgactgtcggtatttcaaccccgttgaggacgcgcacgtgggccgtgtaaaacccgttagggtgcaaggcctcaaagccgcacagtgggcaccgggttaaccggtaagtcagctcggcatcaatcacatgatactggcggcgacgtaccccgttgccgcgatattcatgacgaacaaaggcaactttgatattatggtctggtattccaaggacggacagtgtaggatcgtattgggacatttactcataacctcgcttgcttttggtttcgacgctaacaagcatagcatggacactgagtaggtgtctttttgcgttatccaaaaagggcctacacgttcagtgttgattatttctcaacaccagaaagtgtagacccctttttctgtgtccacaaaatgtgctgtagcgaatgggattactgacctgaagctgctcattctgaacttttgtaagtaaacagttgtgctagattagaaaagagcgtacaattttactagatgataatagttacaaataggaggctggctatgaatcaggcggtttacaacaaaacaattaacttgctcaaagcgaagcagattcgggtcaccccgcagcgtgaagcgattatttcgtacatgattgacagtacggcacatccgactgcggaaatgatttatgcgaaactgtcgccgcagtttccgcatatgagtgttgcaaccgtatataataatctacggcttttggttgatcttaatctagttgaagaaatgtcgtctaatgatgcggccactcattttgattttcccattgagccacattatcacgccatttgtacaaactgcggcagaatctttgatttcagttatccaggcgttacagatgttgaagcagtggcggctaagaaaaccggctttaaagtgagtggccatcacctcgaagtttacggtatttgccctgattgccaagtgaaattaggtatgaagtaattgagtccaataaggcggtgcattacggcgattaagccgtatgtaccgctttttgttgggtaggttaagcaatatcacgcaacaatcaattaggccgtatggacaggagcatcgcgtggttttgctggaaactcaaaaaaatacttgcacaccgtctgagttgctggtattatattattgctgtcaaaaagcaattccttttctaaaaagggtaaggtagaagcgcttgcatcttccatttaacaggatatttaataaaaatgttgacatgtaacgctggtcatgataatctatcaaagttgtcttttgacaaggtcgtcctttgaaaactgaacaaagtttcgtttaaatgtgcagggtccttggtactttggtaccgaggcaaaaagtaacatttgcgaagtcaattcgctagaacaacaaatcgagctattcgaacagctcatatttatatgagagtttgatcctggctcaggatgaacgctggcggcgtgcctaatacatgcaagtcgaacgagttctcgttgatgatcggtgcttgcaccgagattcaacatggaacgagtggcggacgggtgagtaacacgtgggtaacctgcccttaagtgggggataacatttggaaacagatgctaataccgcatagatccaagaaccgcatggttcttggctgaaagatggcgtaagctatcgcttttggatggacccgcggcgtattagctagttggtgaggtaacggctcaccaaggcgatgatacgtagccgaactgagaggttgatcggccacattgggactgagacacggcccaaactcctacgggaggcagcagtagggaatcttccacaatggacgcaagtctgatggagcaacgccgcgtgagtgaagaaggctttcgggtcgtaaaactctgttgttggagaagaatggtcggcagagtaactgttgccggcgtgacggtatccaaccagaaagccacggctaactacgtgccagcagccgcggtaatacgtaggtggcaagcgttatccggatttattgggcgtaaagcgagcgcaggcggttttttaagtctgatgtgaaagccctcggcttaaccgaggaagcgcatcggaaactgggaaacttgagtgcagaagaggacagtggaactccatgtgtagcggtgaaatgcgtagatatatggaagaacaccagtggcgaaggcggctgtctggtctgtaactgacgctgaggctcgaaagcatgggtagcgaacaggattagataccctggtagtccatgccgtaaacgatgaatgctaggtgttggagggtttccgcccttcagtgccgcagctaacgcattaagcattccgcctggggagtacgaccgcaaggttgaaactcaaaggaattgacgggggcccgcacaagcggtggagcatgtggtttaattcgaagcaacgcgaagaaccttaccaggtcttgacatcttttgatcacctgagagatcaggtttccccttcgggggcaaaatgacaggtggtgcatggttgtcgtcagctcgtgtcgtgagatgttgggttaagtcccgcaacgagcgcaacccttatgactagttgccagcatttagttgggcactctagtaagactgccggtgacaaaccggaggaaggtggggatgacgtcaaatcatcatgccccttatgacctgggctacacacgtgctacaatggatggtacaacgagttgcgagaccgcgaggtcaagctaatctcttaaagccattctcagttcggactgtaggctgcaactcgcctacacgaagtcggaatcgctagtaatcgcggatcagcacgccgcggtgaatacgttcccgggccttgtacacaccgcccgtcacaccatgagagtttgtaacacccgaagccggtggcgtaacccttttagggagcgagccgtctaaggtgggacaaatgattagggtgaagtcgtaacaaggtagccgtaggagaacctgcggctggatcacctcctttctaaggaaacagactgaaagtctgacggaaacctgcacacacgaaactttgtttagttttgaggggatcaccctcaagcaccctaacgggtgcgactttgttctttgaaaactggatatcattgtattaattgttttaaattgccgagaacacagcgtatttgtatgagtttctgaaaaagaaattcgcatcgcataaccgctgacgcaagtcagtacaggttaagttacaaagggcgcacggtggatgccttggcactaggagccgatgaaggacggaactaataccgatatgcttcggggagctataagtaagctttgatccggagatttccgaatgggggaacccagtacacatcagtgtattgcttgtcagtgaatacatagctggccggcggcagacgcggggaactgaaacatctcagtacccgcaggaagagaaagaaaactcgattcccatagtagcggcgagcgaagtgggaagagcccaaaccgagaagcttgcttctcggggttgtaggactggacattggagttaccaaagtccgacgtagtcgaagtcagctggaaagctgcgccacagaaggtgaaagccctgtaagcgaaacgtcgaaccctccgtccaggatcctgagtacggcggaacacgtgaaattccgtcggaatccgggaggaccatctcccaaggctaaatactccctagtgaccgatagtgaaccagtaccgtgagggaaaggtgaaaagcaccccggaaggggagtgaaacagttcctgaaaccgtgtgcctacaattagtcaaagcccgttaatgggtaatggcgtgccttttgtagaatgaaccggcgagttacgtttgcttgcgaggttaagatgaaaagtcggagccgtagcgaaagcgagtctgaacagggcgaatgagtaagcagatgtagacccgaaaccaagtgacctacccatgaccaggttgaaggtgtggtgaaacacactggaggaccgaacccatgtatgttgaaaaatgctgggatgagttgtgggtagcggtgaaattccaaacgaacttggagatagctggttctctccgaaatagctttagggttagcctcggaggatggatcatggaggtagagcactgtttgaactaggggcccatcaagggttactgaattcagataaactccgaataccatcgatcttactccgggagtcagacagtgagcgataaggtccattgtcgaaaggggaacagcccagatcaccagttaaggtccctaaatttatgctaagtggaaaaggatgtggcgttgcacagacaactaggatgttggctcagaagcagccaccatttaaagagtgcgtaatagctcactagtcgagtggcactgcgccgaaaatataccggggctaagcataataccgaaactgtgggtgcacccgtaagggtgcgcggtaggagagcgttctaagggcgttgaaggtcgatcgtgaggacggctggagcgcttagaagtgagaatgccggcatgagtagcgaaagatcagtgagaatctgatccaccgtatgactaaggtttcctggggaaggctcgtcctcccagggttagtcgggatctaaggcgaggccgagaggcgtagtcgatgacaagcaggttgagattcctgcactagtttattttgtttaagcgatggagggacgcaggaggctaaggaaagcgcacggctggaaatgtgcgcccaagcaacaagtctgacagcgagtgaaatgcttgcagtcttaaggacaagctgtgatggggagcgaaattatagtagcgaagttcctgatgtcacactgccaagaaaagcttctagtgagaaataaactacccgtaccgcaaaccgacacaggtagtcgaggagagtatcctcaggtgagcgagcgaactctcgttaaggaactcggcaaaatgaccccgtaacttcggaagaaggggtgctgaccgcaaggtcagccgcagtgaataggcccaaacaactgtttatcaaaaacacaggtctctgctaaatcgtaagatgatgtataggggctgacgcctgcccggtgctggaaggttaagaggatgagttagcgcaagcgaagcccagaattgaagccccagtaaacggcggccgtaactataacggtcctaaggtagcgaaattccttgtcgggtaagttccgacccgcacgaaaggcgtaatgatttgggcactgtctcaacgagagactcggtgaaattatagtacccgtgaagatgcgggttacccgcgacaggacggaaagaccccatggagctttactgtagcttgatattgagtgtttgtaccgcttgtacaggataggtaggagccgtagagatcggaacgctagtttcgatggaggcgttggtgggatactaccctagctgtatgaacactctaacccgcgccactaatcgtggcgggagacagtgtcaggtaggcagtttgactggggcggtcgcctcctaaaatgtaacggaggcgcccaaaggttccctcagaatggttggaaatcattcgcagagtgtaaaggtataagggagcttgactgcgagactgacaagtcgagcagggacgaaagtcgggcttagtgatccggtggttccgtatggaagggccatcgctcaacggataaaagctaccctggggataacaggcttatctcccccaagagtccacatcgacggggaggtttggcacctcgatgtcggctcatcgcatcctggggctgtagtcggtcccaagggttgggctgttcgcccattaaagcggtacgcgagctgggttcagaacgtcgtgagacagttcggtccctatccgtcgcgggcgcaggaaatttgagaggagctgtccttagtacgagaggaccgggatggacgttccgctggtgtaccagttgtgccgccaggcgcatcgctgggtagctatgaacggcagggataaacgctgaaagcatctaagtgtgaagcccccctcgagatgagatttcccattcctatatggaagtaagacccctgagagatgatcaggtagataggctggaagtggaagtgcagcgatgcatggagcggaccagtactaatcggtcgaggacttaaccaagtaagagtgtgagcaggagcggttagaaaccggagcataagcgggcctgagcgtgatggccgggctttggccattgcggtcagggtccttatgtgcaggtttctgcgactgcgaacacgtttcgatgacaagtacgttaagttcaaggcagcaattaaacaatgatagccagttttgagagcgcaaagttctcataagtgtggtggcgatagcaagaaggatacacctgttcccatgccgaacacagaagttaagcttcttcacgccgagagtagttggtgggaaactgcctgcgagggtaggaagctgccacgctttttttattccggtttagctcagttggtagagcacctgactgttaatcaggttgtcgtcagttcgagcctgacaaccggagttttttatggagagttgtccgagaggctgaaggagcatggttggaaaccatgtatacgggttttacctgtatcaagggttcgaatcccttactctccgttgtcttgcattcggatgtagctacataagaagcctcaaaacgctgttaattcggtgttttgaggtttttttgaacatcaaataaaatttgactgtgcctgatatgattagtagcatgagtggggatttaaaggatggttaagacatctgaccatcacaaaatcgttaaccgactttagtgactattttttacgaaaagcttgtaatttttaatagcttccgctagtataaatagagcaatagacaccacacatggaggattagctcagttgggagagcgtctgccttacaagcagagggtcacaggttcgagccctgtatcctccataatgaaaacacctaccactgcggcaggtgtttttcttttacctttttgaagttggacggggcgtccaacgcatgagatttgactgtaagcgtcacatagtgcagtacctataattgtcaaaatcctccctctatacttggtctatcaagaagattggaggatttctttatgactcaaaccaatgatctggttccaatccaaatggtcaatcgcgacggtgccgccgtcgtggtgaaacccaaactaggagccaaaattaaactaaacgaagccgaagtccttttctacaatggcatcgataaggtgatggcccggattattttgcaggagttgatggcccatgatacccgacctgtccaaagctaacatttacatcatttgcggtcgcaccgatctgcgaaaaggcattgatggcttggcggccttggtcacggaggagtacaagatggatgtgttcgacaatgcgttattcatcttctgtggtacccgtaaggatcgtttcaaagcactgtattggaccaaaagtggttttctgcttttatacaagcgctttgaaaacggctatatgcaatggccgcgcgatcgcagtgaaattcgccgtttgaattatcgtcaaatgtcacgtctggtcaatggtttagccattgaagaacgccgtaccattcagcctgtaaccccggggtatgtgtactgattgtctgaaagaaagtcttttcttgaagctgacgaaaaggctttcttttcgtgtggccgcttgatatacttttttcaaccattttaacggagggcgcgagatgtcagcggaagcagtcgtgacgacagaacaattcgaatatctcaaacaagagaacgcgctgcttcgcgaacaagtcgagttcttaatgcggcgcctgtacggcactaagcgtgaaagtctcactgacggtcaggttgatctctttgatcaaaccaaaacctttgtggcgccaacagttcctgaaccagaagagcaagatgacaaacctgcaaaacgtaaaaaacaaaaaggcaggaaagcagcgcaactggctccttttcctgaagtggctgtgcaccacgaactaaccggagcggaacgccagtgcccacattgtgccgctgagatgcgtgaaattggggccacggcgaccagccgcgaaccggttcggattccggaacacgttgaagtccacgtccactatcagcacgcctatgaatgtcgccagtgttccaatcagttagatcacagcgtcatcaaaaaggcgatagtgccgaagccgttcattcctaacagctttgcctcaccaagcatcctaacccaaacgatgatcgaaaagtatcgtaaaaaggtcccagcctatcgccagataaaggattggggagacttggggctcgaactaacccgccaacaaatcaccaactggcacattcgggcttgtgactatgggttaggcaatctctacgaactgatgcatcaaacactgctcaaacaaaccgtcgtccacgccgatgaaaccagctatcgcgtgttggaaagcgagaaagtaaacacctatttctgggttttcgcctctggacgcgcggaagacgagcagattattctctatgagcacgccgattcccgcgccacggaagtcccgaagaacttcctcaacgggtatacacattatctccaaaccgatggctatcaagtgtacgacaaacttgatcaggtcacccgagtcgcctgtctttcccacatccgacgtaagttcttcgaggccatgggtaaacagggcaacacgcaaagcggtgccaagaaaggtgtgacatattgtgatcgcatgttcaagatggagcggccatggcggttattaacccctgatcagcgctatcaaaaacgccaaagtcaactgaaatcaactatgtccgatttcttcacttggtgtgaaagtgtccacgccttaccgcaatccaaattcggccgcgccatcgactatgcactcagtcaacgcgaagccatggaaaatgtgttgttggatggccgtttggagctttcaaataaccgcgttgagcgcgccgtcaaggaactcgttatcggtcgcaaaaactggctattctccacgagtttcaaaggggcccggtcaagcgggattatcttgagtgtcatgcgttcggctgaggccaacggtctcgactgccgcaaatacctcgaatacttatttactgaattacccaacctttccgttcctggcgattctaaagcgctgcaggattatttaccatggtcgtcgcaagtccgggcaatctgtgcaagataaacctcaataaaagacaacggcttcggcatttcctcaatcataagggaatccgaagccgttttaaatgtacctcacaatcgtgcgcttacatttgacttagtttaaatagctattagagggggctgattctgacaataaaaacgccactactgattgtggtgacggttgattagccgtgcatgcgcgctagatagagtaacagcgtcgcaatgactgggctaaattggtaaaggtagctgggtactttaaatggtcgacggctgttgatgagcgtgacaaggatgatgataccgccgatagctattaagttgagtcgttgtaaccagtaaccgataacgacggtgattgccaacaagaccatatctgtccacttgggaaaatggttggcccataacccgattagtgctggcacatatagtaatgccaagtcgagcaacatatcctgactgagaaaatgcaaacccgcgtaaataagtaagatttggaataaaattgcttggccaaaagcaatggtaccaacccattgcttggtaactttttgtgtgcgcaacaaaaatgtcaacaggagctgaacagcaactaatggtaacaagatccattgattgatggcaccaatgataccggtaatagcggcaatgattagaactaatgggtaacgtttaacgaccattgcagccgctaagcaaacgcccatgagtaaaagcgcgatgatttgaaaatgccatgtaatttgcaaacttagcgcgatcagaaacggataggcgagtatttgtccgataaaggccgctgcaccagcaccttgattgatatttttcaaattgattatcctttctatgatgcttccattttacaaaaccctgagacggtaaacaaagattttcggaaattttacatcttttatgttatgctactagagttgcaaaacattcccgatggggttcgtcaaagctatgacgaacatgccttgtaacctaaaataataagggggaaacaaaacatgcaggaacgccatttatttacgtcggagtctgtttcggaggggcatccggataaaattgctgatcagatcagtgatgctatcttggatgccatgcttgaacaggaccccgattcacgagttgcttgcgaaacgacggtgacaaccggtttggtgctggttgtcggtgagatatcaacaaaggcttacgttgatattcaatcagtggttcgcgggacgattaaaaagatcggctataccaaggaatcaggttttgatcctgatagtgtcggggtgctggtcgctttggatgagcagagtccagatatcgctcaaggggttgacgaaagtcttgaagcccgtgagtctgatactgatccgcttgacaagatcggtgctggcgatcaaggcatgatgttcggttttgccattgacgaaaccgaaaactatatgccgttaccgatttcattggcccacgcgttaatgcgcaaaactgattcattacggcacaagggtgaaattagttatctgcgtccagatgctaaggcgcaggtcacggtggaatatgatgatgatgacaatccaattcgggttgattccgttgttgtctccgtgcaacatgatccggatgtcacgcttgaagaaattcgccgcgatgtcgaggccaagattattcgcactgtgattcctgaagctttaatggatgatgacacgaaaatttatgtcaatccgactggccgctttgtactgggcggtccgcaagccgattctggtttgaccggacgcaaaattatcgttgacacatatggcggttttgcccgacatggtggtggtgccttttctggtaaggacgcgacgaaggttgatcgttcggccagttatgcagcacgttatattgccaaaaatgtggtagcagcgggtttggcgaaacgggttgaagtacaattggcatacgcaatcggtgttgccaaaccggtttccgtgtcggtgaatacatttggcacaagcgcagtatcagaagatgtgattgaacaggcaatccgtgagaactttgacttgcggcctgctggcattattaaaatgttagacctgaagcggccgatttatgaacagacggcagcatatggtcattttggacgtacagatgttgatcttccttgggagcacttggataaggtgcaggctttgctcaagtaccgagattagcgagaaaagaggcggccttagtcgagaattattctcggctgggtcgttttttcgtgcttatgaggggcttctcaagactaacaacatcgcctggcaactcagaagggatatttatgaagcaaatgaaaaccaatgtcgcactcgtaacggcggcaatttttattggcacatttatgacggcgattgaaggcacgattgtgtcaacggctatgccaaccattatcggcagtttacatggggttcatttaatgaactgggtcttttccatttttctgttgactaatgcgatggcgacgccgatttacggcaaactgagtgacaaaattggtcgcaaaccagtttttctcattggactaacgatatttgtcattggttcgttgctatccggtttgtcacaatccatggaaatgctaattattttccgcgcaattcaagggattggtgctggggctattatgccagtgacatttacgattatcgccgatatttatccattcgaaaaacgagcaaaaatgctcggttttaatggctcgatgtggggaatcgcttcggtaattgcgccgttattgggcggttttatcgttgatcagttaagttggcactggattttctttattaacgtaccgttgggtattttcacgtttggccttgtgtggttctttttgcaggaagatcggcgcagtgtccggcagccgcttgacatgcgcgggacggtttggctgctggtggccttgttggcgatgatgtatggctttcagacattagctgagcccaacggcatctggcagttagttgccatggcaattgtggctacgctgggcttctggcgtttttggcaggcagaacggcgtgcagtcgatccgatcattgacttgaaactatttgaaaatcgtacttttgtgattcataatttgatcgccgctttgatttcggggttcgtgattggatttgaagtctacatgcctatgtggattcaaggaattcgcggcatggatgcttcccttggcggctttgcagtgacccctagttctttgatgtgggtcgttggctcttttgttgctggcaagttattgggccggttccaacctaagccgattctgacaggggccatgatttggctgcttggcggcagtcttgtgctggcattagtgccgcaatcgacaccgtattttgtctttctgctagttgccggcgccttaggattcggctttggtttggtgattacgattactacggtaacagcccaggccgttgtggcgcctgatcaggttggcgtggcaacgagtttcaataccttgtctcgaacgttggggcaaacactgatggtctcggtttatgggattgttttgaatctgcgtctgactcaaggtatcgcggcagatagccggctgaatagcaatatgctcaacgaactgattaatccacataccgccaaaaatttacccgcagcagtgttgccaacgcttcggcaaattttgtatgaaggtctgcacaacatttactttttctcgattatcatcgtggcgttggcgattctagccaatcattttgaagcaaaaagggtgctgacaaaagaaacaattcaggagtcgaatgaagaaagctgaatcaactgaaatatcatacaaaaaaccggattctatttaagaatccggttttttgtacgctgatatcgctctcgtttgccgataaatagctgaagttaaaacggactgaccactcgatcggtatgatcttcggtggcggtttttctgacaggttgtttgtacaatttcgctgttttatcggtgacttgcgcaatgacatcgtagtctgggtcattttctaacgggccaaaattgaacactgtctgcgttgcttcgcgcttgatatcttgcaatctagtgctgataaggacatgtagcatatctgctttttgatgtgatcgttcgatttcttcactggctttggctaaagtatacccttcatcaagcattgtcttgatcatgacgattaaggtgatgtttgccaaggagtatcgtttattgccattagcgtcatgcctgcgagaatgaatgagctgcttcttttcccagtatcgaatttgcgttggggtggctccggtgacgcggctggtttcgcctatgccgagtgaaatatcgagtgaacgtaaacgtgcattaaacggtcccatgacatagcatcctctcttgaaaatgcgctcactggcgccaaaaaccgatgcataaggaccatgattgtgatgaccgattttccggccatcacggccaagcccacttatgatctggtttctcaacgcgcctgttcacgctattaccttgacatttattaagtttaaatgtaatattttctattgtcaatattacattatgtgatatagaaaacatgaaatcttataaagaaactaggcgaatttatggacgttaaagatatcaacgggaaacacgtcaatgtaccaatgatggtcacgaccttgatcgttgggacgtttattacgattttgaatcagaccattctatctaccgcgtttccaacgctgatgaaggccttcaacatttcaactgcgacagtgcagtggttgtcgacaggcttcatgctggtaaacgggattatgattccagtatccgcatatctgagtgcgaaggtgccatcaaaatggttatacatgagtgcaatgagtactttttttgttggcacattggttgccttcattgcaaatagttttggcgttttgctaattggtcgattgattcaggcacttggcgttgggatcacgatgccgttgttgcagaacatcatgatgtcgatttttcccccgaaccggcgcggcgctgctatggggatggctggaattgcgattggggtggcgcctgccatcgggccaacgctttccggttatgtcatcgacaatttcggctggcgtttcttattcggtatgattctgccaattgccggtctcgttattttggcaacattgtttttcttcaaaaatgtcttaccgttgtctgatcctaagttagatattccttccttgattgaatcatcaattgggtttggctccttgctgtatggcttttctgaagtcggtaatgatggttggggtgatccgattgttttaggcacaatcgcactcggcattgtgtttatcttcatctttggttaccgtcaattgcacttaaaagaaccatttgttgaattgcgagtgtttaagagcaaaatctttgccttatccacagtcttaggtaccatcgccaacatggcgatggtcggggtagaaatgattttgccaatgtatttgcaaatcattcacggcaagagtgcgttggagtcaggtttgacattgttgcctggggcgattttgattgctttaatgagcccggtcactggtcaagtgtttgatcgcatcggggctaagcggcttgcacagttaggcttgttcttgctgacgattgcaacattgccatactttttcctgacagaaagcacgccttccatttttattacggtgatttatgctgtgcggatgtttgggatttcaatggtcatgatgcctttgacgacgaatgggatgaacgccttgtcacctgatatgattcgacatgggacagcggttaacaacactgtccgtcaggtggcaacttccatgacaactgctgtcatgatttcagttctgtcaaacgtcaccaatctagccaaaccggcggccagtttgttgaaaaccaatccgctgcagtataagcaagacttttttggggcaacacttagtggctaccacgcagcctttctgttggcagcagggttcagtttaattggctggatcttggctttcttcttgaatacccacgcgatgtcgcaagaagtgacgatcaaaaatgaaaagaaggtgaaggcatgattctatggtttttgggcctgacagtgatcggcctttatctcagctttattatgatgaaacgctccagtttgcgtagcacgttaattgcggtcttcgggattggtgtggtgggtagtctattgctgattacgttgaatgataatgcgcattttggcatggtcaaacgaacagcaactgatgagcagaccatctacaccgcctcaccgaatgcacaactgccaatgttgctaaaacaaaacattggcacggatggcaagcatgttgtctacatttataagaccgatccgaagaaaaaagcggttcataccaaggctgatattgttgtaactaatcgggtgacaacgacagcgaatgccacagcttcgttgacgagcaaaacaactcggtggcaatatcaaaacggtttttatggtgcgttgttcaatcatgaaggggctggtcaattggttgctcagcacaatcaattggtcatcccaacaagctggtcagtgctgacaacggctcaggccaagcagcttggtaaaaagttggccgccttgcagcaaccaactgcagaacaaaaagcgtcactggcagccgcagtcaaggctaaagctgctgcgctggccaaggctgatccaaaactagcagcagatccgacagctttagcgaagcaggctaaggctgcggttgaacaagcaatgattcagcaagctgttcgtgaagtgcaagcacaaaaatagtctgatgccgcccataacgtggtactagggcaaacatttttcgtaacattatcttgacgaatggcttttgtcagccttctaaattaaaaaaagcagtccgctattttttaacggtctgcttttttgattgtttggcaactcggtttgtcagataaggactaaaataccaccaactcaccatcagcaaggcaaagccaagtgaaaatccagcaaagacgtctgtgggatagtgaacgcgcacgaagatccgagaataaccggttaaaagaatcatgccactggcaaggcaggtgatgagccatttggcggattgacgtttgagcagtgcccaagccaaaaggatcatggtaccgtaaaagatcatcgtgccactagaatgcccgctaggaaaactaaaaccgccagcatgtaccaatgcccgaatctgaggatctgcaataaaaggtcgtggtcgccgaacccaatatttgattccgacgttaacgaggctcatcaaggcccccatgctggctgcaaaaagtgcagcgtaacgataacgcttgagcagtaacaccacggcgaaagccatggttaaaaggactaaggatgctggattgccgagactggtgattaagatgagtaagggtttaaaagtgacaggatggaactgggtgacagcagcaattacctgttgatcaatggtatgaatccatccagcgttatttagaatacccgtcaataacgtgatgaaaataaataaagcaattgctgcaagatacaatggttcgggtcggcgttttagcacttgttgcctcctctacaaaacgttcgcagtcgcagaaacctccacataaggacctcagacagaaatgaccaaagtccagccatttctgtctgagtccacttatgttccggtttctaaacgtgcccgctcacgctctgaaatcgactaatgttataagaatagcacaaacaccattgaaccttggcaatgtttttgctatgattgacgcaatcatcaaacgaacaaaggagtagtaagttagcgcgggtgacagagagcaggcggtggtgcgagtctgacgaagcaaagaccgaactgacctttgaagttgctggggtgaaattagtagccacagccggccggaccgttatctcctttgagcgctgtgaaagcagaacttaggtggtaccgcggctgagccgtcctaatgtagatagggcggctttttgtttgaaattaagtgggaggtaacaaaatggcatacgatcatcatgagatcgataagaagtggcagcgttattgggccgagcataacgaatttaataccacaaccgatcctaagaagccgaattattatgcgttggacatgtttccttatccgtcaggccaaggcctgcatgttgggcatccggaagggtatacggcaactgatattgttgcacgcatgaaacggatgcaagggttcaatgttcttcatcctatgggctgggatgcattcggcttgccagctgagcaatatgccttgaacacgggtcacaatccgaagacctttaccaaacaaaatattgagacctttaagcgtcaaatcaacagccttggcttttcatatgactggaatcgtgaaatcaacacaacggatccgaattactacaagtggacccagtggatttttgaacaactttataaacatggtctggcatatgaagctgaggtaccggttaactggagtccggatctagggacggttgttgcaaacgaagaagtgattgatggcaaaacggagcgtggcgggttcccagttgttcggaagccgatgcgtcagtggatgctgaaaatcacagcctatgctgaaaagctgttgacggatctggacgatcttgactggccggaatcaattaagcagatgcaacgcaactggattggcaaatcaactggggcacagatcaccttccgggtaactgacagtcatgagccgtttgatgtctttaccactcgtccagatacgctgtttggtgcaacgtatgtcgtgatggcaccagaacatgaattagttcagaaaattaccaccccagcacaacaggccgtcgttgatgcgtacattgacgaagccgcccataagtcagatcttgatcgtaccgctttagataaggaaaagactggtgtttggaccggggcctacgcgactaatccggttaacggcgaaaaactgccgatttggatttcagactacgttttaacctcttatgggactggcgcaatcatgtccgtgcctgcgcatgatgatcgtgattacgcttttgccaaaaagtttggtattgaaatcaagcctgttattgaaggcggcaatgtcgatgaagcagcttatactggcgatggcgtgcacatcaactccgggttccttgatggtttgaatgaacatgacgcgattgatcgaatgatcaaatggcttgaagataaaggtatcggcagtgccaaaatcaattacaaactgcgtgattgggtcttttcacgccagcgttattggggtgaaccgattcctgtcattcactgggaagatggcgaaaccacgttggtgccagaagacgaactgcccctcacattacctgaagaggctgatatcaagccaagcggtactggcgagagtccactggcaaatctgactgactgggttaatgtggtcgacaagaacgggcggaaaggtaagcgtgagaccaatacaatgccgcaatgggcagggtcttcatggtacttcctgcggtttgttgatcctcacaacaaggaagctcttgcggattacgacaaacttaaggcatggatgccagttgatctgtacattggaggggctgaacatgctgtgctgcacctgctgtatgcccgtttctggaatctgttcctttatgacatcggggcgatcccgaacaaagaaccgttccaacggctatttaaccaagggatgattctgggcgataatcatgaaaagatgagtaagtccaagggcaatgtggttaatccagacgatgtggttgatgagtatggtgccgataccttgcggctgtacgaaatgtttatggggccgctggatgctggtattgcttggtcaacaaaagggttagctggtgcccgcaagttcttggatcgcgtctggagtgctttcattgatgatgaaggcaaactgcgtgatcggattacgacgatcaatgacggtcgacttgataaggtttacaatgagacggtcaagaaggttaccgaggactacgatgctttgcatttcaacacggcaatttcacagatgatggtcttcatcaactcagcgcgtaaagatgatgacctgccactagaatatgttgaaggattcgtgaaaatgcttgcgccgattgccccgcatctaatggaagaaatttggtcacggctaggtcacgatcatagtctgacttatgcgccatggccaagttatgatgaaagcaaaatcaaaaccgacacttacgatatgatgatccaagtcaatggcaagctgcgcggttcgattacggcggatgtcaacgaatcagatgatgagatcaaacaagcggctttggcaaatgataatgttcagaaatttacggcgggcaaagacattaagaaaattattgtcgtaccgcgaaaaatcgtgaatattgtcgcaaaataaccgcactggcttcatcaattaactgaaagaaaaaatggtcaacgaatggttcctgaaggaagcgggcgttgaccatttttttagcgattcagctgtatgaaaagttttgtatttttggcgtttcgattgtgagattacttgctacgtggcggctggtaattgtcaaagttttcttttgattcccgaaagaagcccgggaaagattgcaagtcgcgctgggattgcctaaaatataaaggattatgcaacacgacaggagtttatcatggagaattcgctgggcagcggtaatcaaccgcaacgttcagataaggaaaaaatgatccgcggctcggcgtggatgactgccggcagtgttttttcgcggattttaggggccatttatgtcattccatggcgtatttggcttggagcagcgtttctaactgccaacgctttgtttacaaaaggttatcaaatttacagcctttttctgattatttcgactgctggtgttcctggtgctgtctccaaacaggttgcccggtacaatgctatgggcgaatataaaaccgggatgcgtcttttttaccacggcacttttgccatggtgctgatggggattgtctcgtgtggtgccatgtggctgctctcgccgcttttagcagcgggtgacgcgcgcatgataccggtttttcggtcactggcatggccgttgctgctaattccgtcgcttagtttgattcgcgggtttttccaaggttataacgagatggcgccgagtgccatcagtcagtttattgaacaagtggcgcgaattctttatatgttagtgatgacttacgcgattatggtggcgggtaaccacagctatctgagtgcggtgattcactccaccttcgccgcgttcatcggggccgttttcggacttggactgttagttgtttatttcctccggcaaaaaccacggttggatgcgttggttgcccaaagtgctaattccctgcagatcagtgtcaatgagattcttctagatgtggcacggcaggcgattccatttatcatcatggattcaacgattaatatttactacatcgttgaccagtacacatttaatccaatgatgaaggctttttatctcgttagcgaagatcagcttgaccgtttttatgcgctgtttgccggaaacgctaataaactgattatgatcgttgttagtctggcagttgctatggccattaccgtagtaccattattggcaggtgcgaaaacgcgcggtgatgttgagggattggcccggcaaatcacgaatacactgcagttgttttttatcgtcatgataccttcggcgttggggatggtggcagtcgcgcgcccactgtatgttttgttctatcgggatatggactggttgggcattcgcttgttgcagatttcatcacttttagcgattatgctgggcttgtttacggttttggcagcaattcttcagggattgttcaataaccgtcttgctattcaagagatgctgattggcttggcagttaaagtgattgtacagtggccaatgattttcttcttcaatgtttacggtccggttttgtccacaatgttaggcatgacggtctcgagtctcctaatgctctattcaacgaatcggatgtacaatattcatgtacgccaaaccattcgccgcggcgtcggtattctggccttttccctgatcatgtgcgccgtttgttacctgattgtgaatgcatcaaccttggtgatcaatccgcggagtcagttcggggcagcgttcgtcttgctgattgcagttggggtgggcgttttgatttacgtttatttgattttgaaaacgcgtttggctgatttaatcattggtgagcgaattagtcgacttcgcgatattttacacattcggtgagcttatgcgattagataaatatttgagtcatttacaatttggtagtcgaaaagaagttaaggcacttattcgcgacaagcgggtacgtgtggccggtgatttaatcactgatcctggttacaatgtgttgccggggatcgcggtcgaggtgaacgatgcccaagcggatgggccgcttgaggtcgattatttgatgaacaaaccggccggggtgattaccgcaacagaagatccaacgcaatcaacggtgctggatctgatccgaccacatgattaccgaccgggtttatatcccgtaggtcgtctggataaagacactactggtctgttgttacttacgaccgatggcaatttaggtcatgcactgctttcgcctaatcgtcatattgccaaaacctatgctgcaactttggctaagacattaactgctgacatgaagcagcgactcgaaaccggcattgatttaaaggacttcacaaccgccccggcacaagtcgttgttttgccggataccgatggcaaacgcatccagattacaatcacggaaggtaagtttcatcaagtcaagcgcatgctgttggcagttgataatgaggtgacggccttgacgcgaattgctatgggaccattgtcattgccagccgatttagctgctggggagtatcaggctttaaccgacgacgaacggaccgatttggataatatcactcgttgagcaaccgagcactttgctgtggtgattgtttggctttgtctaagcgagagattttgtttgttacaggagtttaagagagcggccttgattaggcgaaccaagatggctactttgacaaacatgattagaaagggtgcgtgtcatggatcaacaacagtacgtctgccccaaatgccaaaacacggcttatgttgccgaccaatttcaagcaactggtggtaatttttcaaaaatcttcgatgttcaaaataaaaaattcgtgactatttcttgtgccagatgcgggtacacagaactttatcgcagtgaaaccagttctggcatgaacattctcgacttccttttgaatggcggctgagaaggcgtaagttcaggttaagaatgatttcaaaaaagcaggtgacccttcagccgtcgttgtggcggaaagggatcacctgtttttgtttgctgcttgttcacaaattggttcgtcattctgaaagctgctttaagtaggtgggcagttcgcgaatgaccatagtcggtaaggcaacataactattcatagctacaatatcagctacacgggaatggacaaaaacggctgcgagagcggctttgtccaatggctggaactggcccgcaaaggcagcaataatgcctgtcagcgtgtcaccagagccgcctgtggccattgccggcccaccggctgtgttttcatagacatcttcatcaacgaaaacatgtgtctgggaacttttcgcgacgatgatacccggtatttttgcggccgctttttggctggcttcaatggtttgggcagccaggggtaagccagataaccgctgccattcaatctggtgaggggtccaaactagttgggcttgcgggtaatctaggtgatgagaggcaacgagagtgatcgctgatccatcaatgatcatgacctgcttggcattgacggcagcaaaaactgttttcaaaatggtaagggctgtaccatcagtgcccagcccaggaccaacaacaatgaccgttgcttgccgcacagccgtctcaagttccggcgcggtagcatcgaggatcattgcctcaggtaatcgggcgtgcaacgcatgacggttaactgggtcagtcgcaacactgaccaacccggcgccagcgtaaacagcagcactggcactcatgatcgcagcaccgccaaagtgggcattaccgccaacaatcagaattttgccgaaactgcctttatacgtatcacgggcccgtggccggaccacactttgtgcaaattgctctgtcaattgtttcatgacggatttgccgcctcctttaaaacttcccaattagaaaaagttttggtcgtcaattcaggctggccggtcgttaagaatgctttcgcaaacatgacaagcggcgatgcattggcccacgtcaaagtatcaagtggcaaggcgcaggcaccgagcgaatcctggcccataaattgggcaacgcttgtttctagtttaccgccgttaatggatagcgcatagaaaacgcagatgtgctggttgatggtccagtgttggtacttccaaggatagataaaactggttgcccctagttgttgatcaatcgtggctgtcaatccggtttcttcggtgaattcccgcaagacgtcatgttcaagcggttcagggccatcaaggctacccccgggaaggtcgaagcgatgacgataaggacccccatttttcttaatcacgacaagcttgtcgtcaatcgttgcaatcccgtaacaaccaaatgcgcgatgagttttatgtgtcatcaggccacctccattgatcaagggtagcacgctgctgcagggggaacaaattgtaaaaatagttcgtgattttgcttgcgtgccttacctgcttccgttataatcatttatgttgttgccgcgatggcggaactggcagacgcgcagtgttcaggtcgctgtgggatttatcccgtgcaggttcgattcctgttcgcggcacttttaaggtaacaattgattaccacagatagcagaacccttgatatataaggattctgctttttttatttacccttaattgccgtttctttcaaaaaattgagaccactttgagaccacggtcagagattatcgagtgctttgagtgtttttttaacctgtttagcttcggcttttttgaacatgtgctcatagatacggagagtcatcgaaacatctttatggccaagacggcgagaaatataatagatgtccacattttgactagctaggtaagcaacatggtcatgtctcaaaccgtggaaagtgatttgtttatgggcgggtacctggatttgggtttgatagctcttaagcatcttgtttgtggccgcatctgtcgggactaaatgtcgggtacttctaaaaacaagattgagaggatcccgatagccctgagccataaaagcctctgtctgctcttttttgagctttttcaacagttgggtaagatcgtccggcatatcaataactcgaacagaggagggcgtttttgtgggcatgaggccttgtccgaaatgatagtcccaagttttatcaatattgagttgctggtttttgaaatcgacgtcagcccatgtcaagccgaccacttcggagtatcgcattccagtgcctagtccgacggcaattgcatatgaagtattcgcttggaaatttgctgttttatagactaggtctttgagctttttcaaaaaggggagttcaagaaatttaaggccaggatcttttgcagctttgccaacaaactcaaccccctgagtaaagtcccggttaagtatttggttgttgatggcagccttgaccatgccacgtacataggcgttaatttttctgacagtatccttagcatgtgtttttccgtaactgttgatgaaatcttgccatcgatcaagggtgatgtctttgagtttagcgacaccaaagaagtcttttaacgccgccttaaaataatcgtaccgattttcggtaaccttggcgtgtttgcctcgcttatagcgagtgagccactcttcaaagtagttaacaaagccgacttcgcgatcaagcatgttagcgccttgttctaattcggaggctaagatctgggcatcacgtttagctgctgcttgacgggcatagccacgcttgcttttggcgtggcgtataccttggttgtcataatagtaaacacggtagcgccatttgccagtattttcttgggttatgctgattgttgccatgtcacttgcccccatctttgatataatgaggcacgcaaagagcgtacttcgtgagctatagctcctagcacttttatgttgcgtctacccgttcactttggtcggtggggtaggcgctttttattttgctatatatttacgctgcgacataatcctgttgctttttttgatcacttcaataagtaacttgtttacatcttcatagtaatttgaaatttcgttaacggtcatgttccgcgtagcaactctgaacgaaacattgccatgtgccagactatttcgtagatttttgaccaggttaatgctcgttttgacagagtcgtcctccaaggtttttagaggatatacagaaaaactctcagaaaactctttaagaaggtttgcatcgatattaccggacagtttgaatttatgcagattaaactggattgacaccgttttttggataatattggtaattacgtcattagctatctttcgatgattttcattaggggtccaaccacccatgttagttttaaactgctgatcgaaccatagcttttgatatgaagataccagatcttgatacagaactttctcgcttgtaatcgaatcgaaaatttctgccacacaagttctgatagttgattcgacaaggttgtacatcattagcagagtatttgatttttggacgatgatgagttgttccaagggaaaagttttggtttcaatatgatctctaagataattaatatatggattatttgtacctttttctaatgttagtttttccagtgactcaacggagtaaataaaacttctgatggtgttcgacctttctttgaactcagtcagatcaatcatttgcttgcctctaataaagtgttgcgcacgaattctattctttcttgaacttttggtttcgaatttgctccaccggataaagttaaggactgaaatttgtcggaatttagcatcttttggattgcttggctgttaccctcaagactgccattggttttcttaatggctagattagtgccaaccatgatggcctcaaatcttaacctactaaacaacccgctagggcctttgaatacattttctggataattttccttaataaagctgattgttgagaatacctagattgcaataataaagttaccacctagaaagaggcttgctcactgcttgaactggggtttgccaacggagacattttctaggtttgttattgataagcgctgtggcttgttgaatatcggtctctgaaacctgatcaaactgtgttcccttcgggaaatagtagcgaagttctcgattgaaccgttcatttgtgccccgttcattcgggtgataggcgtggcaaaagtaaaccggtatccgatagcgctttgtaagcgcctgatcgcaggaaaactctttaccgtgatcaaccgtcactgatcgaaccggacccggaaagtccaccatcagtcttgcaaaacccttgagaacagcattttgtgataagttttcaagcttagttgtcgccattaaacgtgtgacccgatcgacaatggtcaaaacagcagcctttgacccgcgaccaccgcgaactgtatccatctctaaatgtcctttttcggttcgccgattagctgactcactgcgaatctcaattgaggtgcctactgcttggttatagcgcgaccgaaggtcttgtcttcttttatgacgtttaccgtgatcaaagagttggcttggctgaaaatcgacttgtctttgataaatccagtggtaaatcgtgtgtggcgcacagtgaacggcataaccgaccatttcaggggaccaacctaggtttagcttctcagttaccatccgcttcaacttaggcgttaaaatcgagtgccgaccacaacgatgccgacaagtatcggcatgatcctgagctataatggcgcagtaatcaccttcagggcaacggtgaagctcatgcctaatagaaatacgagagcggcctaaggtcgcggcgatgtattgaatcgtgtggtgttgcatcagttctatctgagatcgttcaattaaggttataatggccatgggacctgtccttctctctagatggtatgttatgcaaacaccattttagcaagaacggacaggtcttttttcacattttctgggtggtaactttaattatgcaatctaggaataattcggatgtgtatttttctgtttgttttgattctttctgtttattgtcccatttagaatcttcaccttgtattgttatgaaatcattgatgaagtcttttactgaatgtgagaagcctttatagttatatgagaatgcgaagaatctagaaagcaactctgtattttcttttcttgctagacgcttctgggagagttgggtaaattcaatgaactttggatcgtctgataaattgataatgagttgcatcattgggtttagtccatatgcaccagcccgaacttcagcatcttctaactttagggaagaagtgttgatacgatcaaataaatcgattttaacaatttcagaagtatctctgtccaacaccgtcactcgtaaagcttgatcttccagccgatttcggtcggtgatacttaaatctgagaaacggaatccattcagaagtgtaagcttttttaagccacttagagttagttcatcattcaagaaatagtctatagttgagatgcgctgcagtccgtcgacaatttctaatttgccatcattttctgattctgctaaaaagagcattggtattgggtagcgaagtaatagtgactcaacgaatcgacactttcgatcagttccccaaacgacctctcgttgatatgcaggcttaaaatatgatttttctcgatatttagctgctaaatatgctgcaggaagatcgcgagtatcaaactttatctcactctgcagttcccgaatttgaatctgtgccttctttttgctttccgcagaaactttcattgtttggcctccaagttttgtaaaatacttataccaattgcttttgcaagttggactggcactgcatttccaatcatgatgcccaattctttagtggatactgggtggtctgcgtcaaagaaaacataatttaatggaaatgtttgaagcaatgcaccctctctgtaggaaattgctctgtcttgatcgggatggccgaatctaccattgccgtaaccgtagtatttcgtagttattgttggcgcaggtttgtcccactccatgcgtccatatatgcttgtatatgacctcccactttttttcttatatgctttcagtattaatgacggtttccagtcgtgccatgtgcccccaggagaagaggccttaattcgttcaaggttggtttcgttaagtttgacagctctatgcattggatcttctggtgaggtctccccagaccgaatagggggcagatttccaatagtctgacgaacggttgggtaattttctttggagtacagtggaggaataatgtcaatcatcatttttttactggcaaaaagtactaaacgtttgcggttttgtggcactccataggcgggtgcatataccacatgataagttacatggtatccattggacgagagagtgcctacaaagtcttgaaaaatcggttctttctccagttgaggaacattctccattgaaacgatttcgggttgaatggaaacaaccagttctccgaaatacgcaagaagatccattttgttacgggtgtgatcctggtccttgtaccgataactgtatgaagagaatggttgacatggtgcgcatccggcaagaagtcttatatcagtatttgtaggatagagtgcatctatttcattcgccgaaacatgtttaatatcgcgttcaaagaatggaacgtgattgttatattcatatggaaacttacattttggctcaatatcaatacccgcgaccacattaatgcccgcatcgataagtcctcgtgttaatccgcctgatccgcagaagaggtccacagcatttactttcatataaatttcctcctgtatcctttatatcaaaaaaagcggaaattctcgagaacttttttacaatgtcccttaataaggattaattgcctaagacggtttttgtttatacagttttcgctttctcctaaataaatcgtagtttgctaacgacgttgagattacagtacttctctatttttccaaattaacctaaggtaggtgccaatctacgagaagttattattgcttgtactgctttttatgacttctaaccaagaaaattaccatcaagttctacttcttctctttgtacttcgtccatatcgggcgaggcttttgtatccagccaacgctcagttaaactgctcgacattttgatcatcgtcttggtcactagcgcaagcggttgttgcgccagccaacaaaataatgagtaagatggcaactatcttttttagcatgatgactcacatcctttatttggtatgtggtacaagccccactctccggcttgcacggggacgccgcttgcgtgggggaaggacttttttgtgtattatcaattatcatgattgtagtttcttatcgttttgtgaatgagacggatggcattcctccgataatcacggtgtcaccctttttcaaattgacgtttacctttggcacctgaccagcggatgaatcggatcctaaaacttcattgatgtctgtgccaaatagattcttaggttgaacaaagaagttaccggatgcgcctgctgctggggacaccgtatatttgcctttcttgatatccttaccaacagtccaatatcccgtgccgaggctgctggtatttttcttattacgcgatgttacgggcacaaagtgtgctgatgtcatgccggaaatctcaacctggtcgccttttttaaaggtggctgttacggcagatgtggttgcagactcatctgatcccaaaatctcattgacgtcttgtccgtttgatttcttcggctggttgagaaagttacccgtgcctgaagtagaactgaccgtgtatcgcccagacttgagctcctctccaacggtatatgtgccaggaatcaatgttgcctcagcggctttagcttgtgccagagtcggaggagtgatgaatatggcgattgcagctaccaaaactgtgcccagcaccagcaaaaaatgttgtactgacaatttctttttcatgatgaatccctccaaaaaaatccagcttttaacgtcgatcagggtttggacgtaagattatttaaatgcgtatgatccgacaactttaccaatcacttcaatattgtctgtgtcgtcagcgtagaaatctgggtagatacgttcgccagtttcttcatctacgtcatcattcaatgaccgaaggcacagacggtcttgctcgaatatcagctttttgatgaatgtcatgtcatcaatgtcaactacagcgatcataccgttagtaacatcttgtgttttctgaacaaagacaaattcgccatcctcgtagtagggagacatactgtcaccgacaactttaaagcagtaatcgtagtgagacggaatggcactatccgggatcttaactgtgtccattggttcattacgatcatcattaaaggcaccatatccagcggccacaataccatcaacctcaacattgaactttggttcatcgagattacgttctacacgcgcttcatctaagctgacaacgttgtctggattctgctgttcattaagttgcttttcagcataagtgtagactttctgctgacgttcagggtggagcttactatatatagggagaatgtcatttgttttggtcataatgttgctattgactgaattgtcaataatttggtcattttcagaccatgattcgtgtataaaagcattgggatcgactccaaaaaaattggttatcaatcttacatagaacatttgtggatcagctttgccgttttcccagcgagatatcatgctcttgctaattttagctttattgtttggatcatgtttagctgtccagtcatttagcttatctgcaagctgctgctgagacaatttttttaatagcctaagattgtgtagtctcttgccaaatagggcttctgtcatgattgcacattcctcctttaggaacatggtaacacgattgttcctaaaatggaactctttttgttgactgaaagcatgaactgggctaagatgtatttgttccttgataggaacggaaactataaagggaggttaagccatgaataatcctggatacagagatttgaaagggtggttagttgcgcggggaatttcgcaaaataaagttgctagttttcttggtactactccaaattatgtaaacaaaaagctcaatggaactggtcctgattttcgtttgtcagaagcacgcaagcttcatacgggctttggggtaccaatggcatatttttttgaagttgatgttcctttttcggaacgaaaggagactgtttaaatgaatgaactaattaagaccatcacacgcgatgatggaacgatcgcggtaagcggccgcgagctacatgattttttaaaagtcggtaaagacttttccaactggtttaaagatatggcctcgtatgggtttgaagaaggcaaagacttttcgccattttcggcgaaaaccccaaacggcgggcgtccacgcattgaatatgtcatgactcttgacatggcaaaggaagttgcaatgattcagcgaaccgatcgaggcaagcaagcgcgtcaatattttatcgaaattgataagcaggcacatcacgatatgaccggtctaagtccagcgacacgggcggctgttgcagctacgcaagcgctagccgcacaagagcgacgcttgaatcgagttgatgcaaaagtaaatgccatcagtgacatcgtaagtatttccacaatggactggcgccgagcaactcgggacatcattactaagatcgcacatatgagaggagacgattatcaagccacacggaaagatatctacaaagatgtcgaacaacgaggcggatacagcttgagtacacggcttaccaacctacgcaaccgaatggctggggaaggccaatctttatccaagcgaaataagactaacaaagttgatgtgatcggcaatgacaagaggcttattgagatctacatggcagttgtcaaggatcacgccatcaagtaccgcgtgtgggatgacgaatattaaaggaggctagcaaaaagaaagaggtgaaggtatgccatcattcaaagttattgaggatgaatcgaattatttagtatttacgcctgaacagtttgaagccgctgtagaaagagcacggtcttatctagaagggcagcgttggaaggtcaaggactgcatagaacggttaaacggctatcggcgctcagattttgtgaattatgttctgatcccgaagcgagatgagcttgaacggattggtgcgttattacaatggcacgatgctgatcatcgggactatctgttcaaggcaaccaccatgagtaagtggctcgatgacaaccttgatcaaattacaaaaggaggatggcgctgatggcagccattattgaaacactagtaacgccgacagttccgttctggcggtatctgctattgatcgcgcttggcgtcatcatcggacactgccttgctggaaaaggtaactggaagacatggattagctaaggaggtgagcgcagtgaatatcagcacgaatctagatgaactagaaaagctgctcagtctggccacgaaccaaactaagcagcttcaggaaacgttatcaagtattgataattttgaacttggtagtggtgcatttaagcgtgagagcaagcgggacgttgggctaaccgagtcggttaaaggttcttatgaagccaatcagtgacatttttggttatcccgtaccaagccgcttcgcccgatagtttgccgacaaagatggaatcatttgcatcaatgacagactcaagattatcgcgaacgacctttgcactgtcgtcagtgcaaatgcaccaacaagattccataagctttgcccatttggtgtaagacttaatcttttttgagagatcgccataacgttgtcccggattggataagtcataagaaatcaaaaaagtgttcatgctattacctcctatggagtgattatcgcatatcttacgaaggagttggaaataaatgactaacgcagaacacaccatcggtgacctgcttaacgagcacaatcgtttgacgctggatgtgattcgcggcgagcattcaccgattgctcagacattgttgaaacacaatgccgagtggcgaaaacgtgtttacgatctattcgtcaaggcggatccgcatgaactacacgacccattttcaatttaaggaggtgagaaacatggctttagactatgtgatttatgtccaagcagagtcgatttataaagacttagtcagtcgtagaacagctaaggcaagtgaactagctcttgcagcagcagataatgactccgatgcacaagggcttggtactgaatggcttttactcgatgagctcatcaagaaaattgaagaagacgaagaaaaggccgctgatgcagccacatcaacgaccaatcaaaaaacgaaaggaaaataaccttatgccaccagtatacgaccttaagagtaaatacgctaccttgttagccaaagccgaggatatggaaattgatccaatcgttttgcacgacacgcttgagtcaatcaaagatgcgattgaagacaaagccgtcggttgtgtccaggtgatcaagtccttagaagctgacgttgactcgattgatcaggaaatcaaacggcttcaggaacggaaaaagtcttaccagaataatattgcgcgcctaaagctgtccttagttgatgccatgaacacaaccggacagcaaaagatcaagacgcctctatggacgatttgggttcagaagactgcgagcgtgggcgtgatgaacgatgatccgaaaaaggttcagacagatttcgttaaggtcgagaccgtttacaaagtcgacaagcaggccgcgctcaagaagctcaaggccggcgaaaaaattgtcggtttgcagcttcgatacagcgaatcactaaggacaaaataggaggaaatattatgagtaatcgtcaaccttatcaaactcacgaaacggcatcggacaagctaatcattcaaaaacaaactcgcaacaagtattttactatgttgaatgtcacgcccgagactaaagaacaaattcagcaagtatcaacagaaacaggtgtgccgatggctgacgttacgactgcactagtcaagtttggcattgatcatcttgtcatcatcaatgaaagcccagatgactaatgccgttacgtgattatcagcaaaaaacgattgaccgaattattcggtcaatgaagtccggtcatcagtcaattattgttcagcaaccaccgcgaacaggtaaaacggtcatcatggctgaaattgccaaacgtacaactgacaatggcaatcacatcatgttcatggtgcaccgaaaagaaattgtcgatcaggtcaaacggaccttcagtcgttggggtgtcaacatgaacttggcaactatcggcatggttcaaacgattactagacggcttgataaacttgaaccgccagcagttttattcattgatgaagctcatcatgcactggccaagtcatacatgcgcatcattgaacggtaccccgatgcttataagtttttattcacggcaacaccctggcgaatgaatggagatggctttgaagctgttgccgacgatcttatccaaggacagtctgttcaatggttcattgaacacaaataccttgccccggttgactattatgcacctgcagatattgacatctctaagctcaaaacgaaacgcacaggcgagtttgatgatgcaagcgttgaagaagctttgaaaccaaagatatacggtgatgcagtcaaaagttacaagaaacttgcatcaggtaaacaagctattgcgtatacgtacaacgtggcatcagctaagcgattggcccaagagttcttggtaaatggaattcgggctgaatcagtcgatggcaccacacctgcggaggagcgtgatcggattgttgctgcgtatcgtgagggcaagattgatgtgttaacgaatgctgagttgttcactgaggggattgatttaccaaatgtcgatgtggtgattatgctacggccaacacaatctttgtctttgtatttgcagtttgctatgcgttcaatgaatccgcgaccaggtaaaacagcagtgattattgaccatgtcgcgaatgtcaaccgattcgggttgcctacagacaatcgacagtggcacctagctggtcgagaagatgtagaaactggaacgcatcgcgatccaatcaagccagtaactgtgtgtccagcttgtttcgctaccttttatcgtactgggtcaacgtgcccgttctgtggtgccacacttgcccaggagaatcagttggaggtggttgaagatgctcacctcattaagctggaaactaagagacgtctcgccgttgttcatgaactgatggacaacaatgtttcgatgaatgttgccaacaaacgaccagaccagcttaaaagtatgaaggagttacaagcctatgcaaaacttgctggttataagccaggctgggcttacattcaaggaaagaatcgggggtttatctaatatgtcaattttacctgtcaacaagccacaaacgccagtcgacaccccacggaacttcttcatctggggcgctacgatgagtggcaaaagttaccttgccgaacgttttcccaacccattgtttttaaacactgatgggaatgctttagcaaaccaagcaccatccattcagattcgtaatatcaaaagcaagcagggcttgaggcaatctgcgatcaaacagcttgatgagattattttggaacttgaaaacaataatccgggatatgaaacgttggtgcttgatgtcatcgatgacatgattgttatgatcgaacaagctatctgtgtcgacaatggtgttcagactctcggagacattccgtatggcaaaggctatgcgttgtttaatcaagtattgcaagaacttgtcatggatctgaagtcgctgtcaatgaacattgtttatatcagtcggattgcagacttggttgatgatgatggcaagtcgtatgaagcaccgtcactgaagaccaaatactacaacgttatcaacggcaacagtgatcttgtcatccagacgaaacgagttggtgcacgctacattcggcgggtgacagatcgtcgtaagaagtattaccgcagtcagattgatgatccaaagattctgcggattcttgaaaatgtagtcggtgctttagaacaagacgcaaataacactgtcgcaagcaagactgtttcaaacaaaactaaggagaaataaacatgggactattagaaaatgccaagcaagcacttgatggatttgatgcaacaaaggacaaaccaacatcttatgatctgttgccagacggtgattatcaagtcgttcttagcaacgtagatcacttcgtcactgatggcggctacgatggtttccgaatccaattggaagttttggaaggagaacattctggatacaaggacagcaacatgttcaatttcgatgaggtttcgtccaaaggcaaagcgattccgcaaagtgtcatcgctagtcacatcaagctggtcgctcggttggcaaatgcagttggcatcacgctcaaagatgccgactgggagaccatcgatacactggtcgatgcttttctgcccgccaaaggtaaagtgatcatcttgcacttcagcagtcgcgagaacaagaagaacccacagtatccgtataagaattatgattttgatccaaccgatcaacctgctacaccagagctttctgacgacgacataccgttctaattttgttgatgcagtgtcattagaccaccggacgggtgcgatgcccgttagaaaggagcggcaggcatggataatctgattaattatgcggttgcttatgcagaaaaaggcttctatgtgttaccaatgcaccgaaaaaaaccaatgattgaatttgccgatcgcccagcaatgacggctgatgaaatcaagcggttctggacaacgcatccacaggcgcagattgccttgcgaacagttcatcatttcgtggttgatattgaccagcatgatgatggtgctgacggattcctgtcgttcaacacctttgaacaccctgaatactttgaggatacgctatcgcaaacaacggcgggcggcggcatgcagatattttatctaaaaccggacggtgttgaaattccgcagatcattggctggttgcctggtgttgacatcaaagcgcacaccaataactacaccatggtggcgccaagccgcacggaaaaaggccaatacaagtgggattgcaaacactcaatagttgaagccagtgatggattaattgctgaattgacaaaacagaagttcacagagtcgaaataccagccagaagcattgagtgcaccagtaaaaaaatcggcaactgcagaattgtttgagcaggttgttaacggtttaggtgaaacgggtggtcgtaataatgcgctggccgcatttgttggtggtttgttattccgcgatgtcagcgttgatgctgttctggcacttgcaaaacaagcaaatgacaacacacctaagtcacttgatggcaaagaatttgatcgcacctttgagtcgatggttaagaaagagattcggaggcgagagaagattgcttactgatgatatgaagaaattgcaggcgatgcaaagtaatgtcaaaccaatgccaattgcattttcactcaacaaagatggttatatccgaccaaatagtattcgtaatgtggtgttagcactcgaacatgatccactgatgatgaagacatttgcatataacgagttcacgcatgaagtggatgtgatcaaggcaatcccaagtcttcacatcagcaagggccaaatggttgatgattatgtatcgctctcactagactacttggaaggcaagtaccacgtgttattcaatgacaaagtgttcaattctgctttgatcaaagtatctcgtgataatgcttacaatccggtcaaagaatacatggagaaggcgtttctggcgtgggatcacgagagtcgtgttgaaacgtttttgccaaattatctgggagcagatcaatcggatgttacaacgacgattactaagcttttctttgtaggagcggtagccaaggtctttcagccaaccatgaagtttgactatgtgcttgacctcgttggtggtcaaggagctgggaagacaaccctgcttaagaagatgggcggcaagttttacacggatcagttcactgactttcgggacaaagacagctacgcaatcatgttgcgggcgttaatcgtcaatgatgacgagatgacagcgagtagtaacagcagcttcgaagacttgaagaagtttgtttcagctgagcaactcgaatttcgatcaccatataatcgtcggcctgagcggcgagcaaagtcgtttgttcttgcgcgaaccactaatgaatacacctatttgaaagacaaaacaggcgagcgacgattcttacccgtgttagcagacttggatcgacagaaacttcatcctgtgactgacatggataagaacatcgtccaacagctttggggtgagtttgtgagttactacaaggccggttttgactttggaatgaaccgtgaggaagcggatcagttggataaacaccgcgagaactttatgtatgtcgatgctgttgaagatgaaatcgatcgaaatctgtcgacctggtcaagcgacttcattacgagcaaagagctggctcgactgttaggtgttgatgacttggttggtaaccgacagcttgcaaagaagatcaagtatgtgatggacaatcggcgcgattggaagccagggtacaaaaaagatgacaacgtttcgattcggggttatcgacggaagtagaaggatcagaagtttacactggtttacactaattttggattactgtaaacctgattcagatcaatgatatcaaaggtttcagcttggtggtttacactactacactaattctcttaagaaaaataaaaaatgtatatataacagagaacagagaaaagtttgaaacaagtgtaaacctgtaaaccgaggaccaattactagagccacaagggataagcctatttttattagtgtaaactaagtgtaaaccttaaggcaaaatgacggtgtttcgacacgtggatataagaagaagtaggagaaggtgtggtcactgtgggcagagcgtggtcactaaaaatgagcttagtgaccacgtgcccacgagcacttgaagcgaagagccacatagcatagaggcaatttttgctagtgaccacaagtgaccacgttcatggggttaactaatgacagcagaagccaaaatacagaatgacattcgagttgctttgtcggcacacgggtgcacaatcattcgcaccaatagcggcagtgtcaaaactgttgatggtcgaatgttcatagcagggccgccaaagggctggccagacctaacaggatttcggcacagtgatgggcggctaatcttggtggaagtcaagaatgaaactggtagattacggcctgatcagaaacgttttgcagagtttattcaacgtttccctgtgatatacggtgtatgccggtcagctgaggaagccataaaactaattgaggagtgacttgaaatgatgaaaacacacaatactttagacgacttaaataatcacttattcagtgagatggaacgattaaataatgacacgctagagggtgagtcattagagcaagaacttcgacgggctgacggaatttccaaaattgcaacgcagattatcggaaatgcccgaaccattctaagtgctcaggttgcttatcagaataatgagtccgctgatccaacaatgccacgagtgttgcaaatgaatgaggtgactgaaaatgggaaagcacttgacggtgtacgacactgaatattggcgtcgaaacgctttgttcactttggaagaagaacacagagctaaacaaatcattcctggacgaacatggactgaggcaacaaaacaaatcaattttgagttcgaaatgaatctgacttcacgacagattcgaaactggggacatcgacaccatgtctatgctgctgaaatcatcgataatagcgagccagatgtcaagattgatccagttagagaacagcggaataagcttcttaaagttaatcaaactctcaatcggttgaattctggtatcaaaacacgacgggtgaggggttggcgatatgtctaggctcttagatgacaagcagcttgagacttataaaaacttcgtgcctggtaacacggcggcagaaatagcaaatatggttcacgagaactggggcatccagttaacagtgcagaaagttcatgccttaaacatcagaaacaacattaaatcaggtttatatcaaaaatattttggcaaggcagatccaagaaggtcatcttcacatcacgaccttcataaaagaatggcgattggcacggttaaaaggaacgaaactcgttcaaaggatcgaccaaatcgtgcaccaattgtagtggtgaaacaggctgagagaaaatggaaaccaaatcatagacgagtttgggaagaagcgtatggcccaattcccaaaggttacaaaactgtgtttttggatggtaactcgttgaatttcagcattaccaatcttgcactcgtcacagacgcagagtttttgatcatgaatgagaagcatctaatttcgtccgataagcaagttactcgtagtggtatagaactggctagacttctgtcgaagacgcatcaaattaaacgaaggaagcggaaaaatgaacgcagctagaaggtatccgacgccaaacgatccatatgtcaatgacaaaggaccgtggggggtgaaggtcggtgagatgtttgttaagtgggcaatgtggggatcattgtttcccaaattagaaatgaagaaggtcgtgttagtttcaaagccaaagcctctgaataaccatgatcaagcaatttatattgctcgagccatcggcgggaaagtcattagactgacgaattatctggaggtggattcatgaaccaagcaacctaccgtcatctgcaacaagtattgagagattatccacatattactcagtatgtgcgagaccgtcgagaagcactaatgtatggctggcacgagcaagatgagaatatagggggtggaaaaactaatgggatcaacagttctgacgtgctaccgattcatttagcaagtgacaaacgtttatgggttttggaacagcaaaaggcagccgttgagcgaaccattaataagtctccaacgttagctaccgggattgtttcagagctgtattttaaagatcgcccaagtcttacagtaaatgggattgcattgaaatttcatgtcagtgttcgatcagttcaaaggcttcgaagaaatttcatggagactttagctgacgagcttggatggtgaagttgtcgcattcctgtcgcatataccctctgtaatattgttatcatggtagtatcgaaaggataggacatcgcaacaacgcagctgattgatcttataccttctatattttgagtcggtcatgatggccggctcttttaatatgtcattgggaggtggatacgatggccatggtaccacgagagatcagcgagcctttctatcacagtaaagagtggaagaagacgcgtgccgcctacattgccagtgtcggtggattgtgtgagcgctgcttgaagcgaggtatcatcaagcccggctacatcgtccaccacaagcactacatcacagcagacaacatcaatgacccaagcatcacgcttaactggaacaacttagagtatctttgcttcgattgtcaccaagaggaacactttgagaagacggcagctgttcgttctgacgttatgtttgatgctcatggtcagttagtaccagttagtcgggcccccctgcgaagccataagcagctgcttaaaaaggaacggcatgcaacacacgaataatacacaggttgttttttcgtatgagggggggataacaaatttaaggggatgacgaaattgagcctgaaaatgtcgattgaaaagcaggatgtggccattcagctcgaatatgagcggttgcgtcaaacgttatccggtatctcagcggagaagttggcagcggccgataacttgatccaaagatgtgcatttatgaccatcacgcttcaaatcttggaagatgaagtcaaatctaaagggccaacgattatcatgcacaatgggaagcagacgatgcgtgttgagaatcccgcccagaaatcatacaacacgatgatcaatcgatacactgccgcgatggataagttaatcagtttgctaccgagagaatccgcaatcatgcctgccgatcccaacaaagagagcgacgattttgacgactttgttgatgagcgaggcgaatagcaatggctgacattcagatcaagattcgtgtcgatcgacatgtcagttatccacctgattacgatccaattactcaatactggcaatcgtttgtgcagaatggtggtgatcaagttgtcggcaagaaaatctaccgcacgtacaagaagctcatcgcagacatgcacaatgacaatagtgaatggtactactcaaatcgtcgtggtaatcacgtgcttgaatttatcgagaactattgccgtcacagcaagggaccagcaggcgggaagcacattgtcctagaactatgggagaaagcactgttggcagcgtcttttggattcgttgatggtgcgggtttccgaaagtatcagcgggttgtcctgattgttggtaagaagaacgggaagtcgctgctcggttccgctgttgggttgtacatgcagattgccgatggtgaggctgggcctgaagtgtacgcggtggctacgaagaaggatcaggcgaagatcatttggaatgaagccaagcgcatggtcagaaaatctccgactttggctaagcgaatcaaaacgcatgtggctgatctgtcttcagaagagtacaacgacggcgtcttcaagcctctgtcatctgacagcgatacgcttgacggcctcaattcttcttgcatcctgatggacgaaattcaccagtggaagaacggtgagccactttacaacatcatggccgatgggatcactgcacgggatcaaccactgattttcatcacatccaccgctggcacgatccgcgaagatatttatgatcagatctacgacgacgctgagatgacgattgcaggatatgatcaacccgaaggttacagggatgaacgttcattgttcttcatctacgaactcgacaaacgtgcggaatggcgtgatgagaaatgctgggtcaaggcaaaccctggacttggcacgatcaaaaacaagaccacattggctgaacgtgtcgaaaaagccaaggcaaatcatcgactggttaaaaacctagtctgcaaggattttaatatccgtgagacagcaactgagtcgtggctaacctttgatgaactgaataacgaggccacgtttgacacgctcaaactcaagccgcgatatggcattgctggcgctgacttatcgcagacgactgacttgacttgtgcaactgtcatcttccagatacctaatgatgatcacatctacgttaagcaaatgtactggctgccggaagacactcttgagcagcgcgcacaggaggacaacattccttatgccacgtggcgcgatcaaggattgttgaggacgagccaaggtaataaagtctattatcgtgacatcatggactggtttgaggagcttgaacaagaatatgacatttacctgttcaaaggcggttatgacgcatggtcagccacatacttcgtcaaagatcttgaatcccgatatggcgaaaagacctttgatgcaattccgcaaggggtgaagacgttatcaagtcccatgcattcacttggtgcagatcttcgttcaaagcgaattgtctataacaacaatccaatcttgaaatggtgtctgtctaacacgacgattgtgactgacagaaatggaaatatccaacctgacaagggaaaaaacaagcgcaagcgaattgatgggatggcttctttactcgatgcttatgttgtttttgagaataatcaagaagaatatcagacgctgatttaaccgtaaggaggtgattatttggcattttggaacaatctttttcatagaaaaaatagcggcgtcacagtcacaccggaatacaagcttgttaccaactacggtaacggcttttttggttggaatggcaaggtctatgaatctgacatcattaggtcagccattgaggtcaaagcaaccacgatcggcaaagcagtggccaagcacattcggtccggtgccggtgacagcatcgcagtcaatccagacgtttatatccagttcttgttatcagacccgaacccgttaatgagcggccagatgctgcaagaaaagatgatcacgcagcttgaactgaataacaacgcttttgcctttgtccagaatgatgccaatggaatgccaacagcaatctggccaatcgtggctaacagtgtcgaagccattcaagacaatcaaggcaacctctatctcaagttctacatgccgaatgcacagacctacatctttccatattcgcaggtgattcacctgcgcaaagatttcaacaaggacgaaatctttggcgaatccaatggcccgactttggcaccactcatggagattgttacgaccactgaccaaggtattgtatctgccattaagaattcagccgctgttcgctggctgttgaaattcaatactgctatgcgcccggaggatatcgagaagaatacgaaagcttttgttgcatcgtatctgcagacacaaaaagatcaggattcaatcggtgcagctggtgttgatgctaagaccgatgcaacccagttacagcccactgattttgtgccaaatgctaagcaaatggatgcgactgtggatcgaatctactcaattttccataccaacaaggccattgtccaaagtagctacactgaaaaccagtggattagttactacgaaagtcagattgaaccagtgattaggcagatgtctgagcaatggacgagccgcttgttcaaccgaaggcaacgttcgtttggtaattcaattgtgtttgaatcaagcgatttgagctatgcaagcatgcaaaccaaactgtcactcgtccaactagttgaccgtgctgtgatgactccgaatgaattgcgtggattctttaatctgtcaccagttccggatggcgacaagatgttactccgaaaggatacagggacagtgccttcagcaactggtagcgacggtgcccctgatccaacggaaggaggtgatgataatgacgacagtggtaccgattaaaggtgacatcgttactaatgattacggatggctttacgatctatttggcgatgactatgcttcacctaaaagcgtctctgatctaattaacaaggctaatggtgacgacttatccgttgagatcaattcaggtggaggaattgtcgatgccggctctgaaatttacaccatgcttcgtgcttataaagggccggtcaatgtgaacgttgtgggtgtggcatattccgctgcatctttgatcgcgatggcgggtgatgtcgtagccatgtcacctgcagggatgatgatgatccacaatgtctccggtggacagatgggtgactatcatgacatggagaatgctgcggatttgttaaagaagtcaaacacagcaatagctaatgcctatatggccaagacgggtctatctcaagcagaaatccttgacttgatggattcaacttactggctggatccgcagactgccattgaaaaagggtttgctgacaagatgatgtttgacaatgcggagaagccagggaaaatgatcatgactgctagcctgaataagattccaagtcttgccacgctgaaccaaatgaaacacttccgaaacacaacagcactaaaaagagcgccgtctgatgatgatcagatggcgcttttgaatgcagaatacaatctcttaaatttgaaaggggaataacctcatgaacaaagaagaatacttgaagcaacgcgaagctctgatgaacgatgctcgcaccgcaatcgataaggggaagtctgaggatgccaacaaagcaatgaagtccgtgaaggatttggacgcaaagtgggatcagcaaacaaaagaccaagccaacttggcagccctggatgaccatgcgccaatcaccttggctcaggtagcaccagccaacgacattgttggtgttggaaagtctcttgaaaacaccaaattgaacactgttgccaaaacacagccgacttatgacaaggtatgggctaaaacgcttttgggtcacactctcaatactgcagagcaggctgtattcgataaggaaaacgcgcgccttaatggcgcaccattttctcaccaaacggggaacactccgaccttgattcctaacactgtggcagctggcatctggaagatcgcagaagaacaatatccagccttcgctgatgccaagaaattcaacgtttctggcacgctgaccatcaacaagcacgatggcattgtttctggtgatgctcagtgggttgacgaaaacacgcaggctgatgatgagcaaaataaattcagtcaattggtgcttaaaggttacgagctgaataaagtcgccaccgtgtcctggaagatgaagagcatgtctgaagaggacttcatcagtttcttgactcaagagcttggggatcgtctgggtgttgcgcttggtgttgcgattcatcaaggcgatggtaaaaattcaccgctaggcattgagactgcattgaaggccgaaaaagggacgccacaagttgccacttataaggatcaaatcgcatataaggatatcactagcaccatggccaagatccactctagttttgctggcaaggcagcagtttatgcaaatagcaaaaccatttggaatcaattggcaaacatcgttgatggtcaaggtcgtccgttgtttattgctagcccaatcaatggaggcgttggtagcattcttggtttagttgtgaaaccggatgctggtgtcaatgatggggacgtcctgattgcggatgtggcagatacagtcgttgttaacattaaccaagcactcacagtagcaacagaagaccacgtcaagggacgttccactgattatggtgcctatgcaattgctgacgcaggtcttttaacaaccaagggggcagcattgctcacagcaggcccaaaagtgtagccccgcaatcagttaagtctgaaggaatcaagggcggggttaagttaacagcaaagtagaaaggagctagaacatggctgatacaccagatcggagcgccgaattcttaaaggcactccaaaaaggcaaggtggttgctgtcggcaataagggcactggtgaagttgacgttaccggcctggccgatgggactgtcgtcaaagatggtgactatcaggttgtttttgatacagacaacaccaagacactgtcttcagtggccagtgatccgattgatgcacctggcgcaactgtgccaacaacgccacctagtctaggataggcggtgatcaaagatggctgacgagaaatctgaagaagaaccaaccttgttagatctcttaaaacaacacatccgattggaagatgacatggacccttccatgttgcaattctatctggacgcagctgacaagtatgtccagcgtaaagttggccatagcgtgaaatacttgcagcttatggttgctaccgtgatgaatgacaatcgatctgccggtgacgatctagtggcggcacttgaagccttggagccgatcttctacttggaggtgagaacagatgacccagacagtcaatctaacgaaccaactcaggtggatagccacactgttggaacttaaggacggcgttgacgcacacgaccgtccaaaacaaacgtgggaagacaagcgggtcttgtattacgccgacattgggatcacctcaactgaaaaatatctcgcgcagcagaacaagcaggatgtcgtcttgcgcattttgattcgtcgggatatgtcgattactcagggtgggaatcgtgtccggatccgaggaactgattacaaaatcacacgaatctacgagacgcccgacaatcaaagaatggagttgagtctggactatgttgatcacatttgacgagtttctggccagactcaagcaactgggtgcggtctatcgagacgttgcaccacggacggccaagtatccgtactggatatacacctatacaaacactcagcgtctagtagccagcacgggtacacggttaatcgtgaatgagtatcaggtgtctttgtacacaaagggcgttgaagacgagctactgccgttcatcaagacgtttgatgatgtcccgttccaatcattcagaggcattccgggcgatgaaaatgatgaaactatcacggatttgtacacgtacatcgaggtgattgcgggtggtcaataacaacggttttgaaacaatggccaagtatctcagtggtatcaaagtagatgagtcagtgtcgaaagaagggcttgttgccgcagcaagtcaatttgctgacaagctccggcccgagttgccaagtgaacctaacgctccgctcgcacaaacctatgggacgttaagagataagctacaggttgttgacaagggcgatcacatccaagtgacgtttggaaatgcattttggtggctctttctggagcatgggacaagtcccaagaaccatcaaggaatcagggcacgcaattatgttcacaacacctttgctgccaacaaaaatacaattatgcagactatggtcaaaccggtcatggatgcattgaaaaaataggaggaatcgctatgtctgataaaccaagcaaagcaaacgatattgagctagagctcactattggcgatatgtttttcgctatgaaaaagcaaaatgagacggcatctactgatccggtcttcgatacaagtgttatccggatcccgaacatcaaaaagattgccttcaaagggaacggaaagtcgaacgacatttatgccagcggtaaaaagttcgggacaatcacgcaagaaaccagtattgaagtgacacacacccacatcgggatgccaattgcagttctggatgcaatgaaaggcatcgcagcgaagcatggggtcgagtttggatccacacttgcacaatcaatgccagagtttgcaattggttttgacacatggttggccaatggacagcatgatggcatctggttgacgtcttgtacacttaaccctgctgttaatgaaactcatgcaacttctgaagagtcattcaaggaagtcaaccctgatgtcgtctacaacgcaggtggtttgcgtaattcgagtatttactactcacgctataattcagcccgagacagtgctgacctgactgttgacgactttttcaagcaggttattttttctccagaacagcttgaaacgatcgcaaaacaaaaaccgatcccaaaagtgtagccccgcaatcagttaagacgattgccaaacaaggcggggaattaacgattattgctaattaggaggacaaaggaatatggcgaagctctctgatctagttaggctccgagacaatcatttcatcacgattcaaggtgcaaaggtacctgcagcgttcacttttgcctcaattgacgctattgaatccgcatatgggcaaggctacaaaacattcgagaaggatttgaatcttatgctcaaacggaaagtgattcatcgcgatcagaaaaccatgaaactcatttgggcgcttgtttacggcttacttgtcggtggaggtacggaaactacctttgatgagatgaaccgtgctattcccttttcggaaattcctagtgttattcaagaggcaatggatattctaaatgagcagaacttccaactaagtgacataaaaaaataaagtcgccacaacaggaaggtgaggcccaggaggataacgattacccctgggccttttatttgtatgtggcgaaagcgctgatgggatactcgcttcaagaattcatgaaattaacgcctaatctgtggctgaaacaatatctaatctatatcgagattaataatcctgatggtatttacaaagagaaacctaatcccattcggaaacaggtcacactggacgatattccattttttaactaattaagaaaggaggaaaatcatggctgacgaaactcaaaacgttgttcttgatttcaagatgaatggtcaagtacagtttgctaacacagtgaaagacatcaacgccgtgatgaacacggccgcaaaggaatatcgagcccagatatcgtctatggatgagaatgctagttcgactcagaaactggctgctgaacaacaaaaattgcaaattcaatccgaagctgctgctaaaagaacgcaaattctgtctgaacaattgaagacgatgcaggatcgtggtgaaacatctggctcatcatttgatcggctcgtcggcaaggttgcggatgcacaacgggttgaaaataacctgaaaggtgctcttgatcaagttaacagccaactcagtgagcaaggttccaaagctaacgatgccaaagatcatatcagtaacctgcagcaggaagagggcgagcttgattctaagcttaagctcgcgtcttcatcggctaaactggaaaatgcccaactaggtgataatgcttccgagtcgcagaagacagctgccgcccaacggcaattgtcggaacaaatggacttgtctcggcaaaaagttgataacttgaagcaacagttgaaggaaacggtcaccgcttacggagaaaactcagctgaagcaacacagatgaaagtcaagttgaatgacgccgaaacatctgtggccaatttgggtaaccaaatggataaattgggtaaggagtcacaaggtactagctcaaagcttgacgagattgctaagaacacagctgctgaacggttgcagactgtcgccaatggattccaatctgctggtcaaggcctacaagattttaaccaaaaggcgcaggaagcatggacacaaactgatgacgctgttgataacctgactagcaaaactggcgctgttggagacgttgcagataagctcggtgagtcatttgagaaagttgaacgctccgagtctggtgcgcagatggaatcgatggatttgtcgaataccatggcagggcttactagtcaattcaatttgagtggtccgcagctggaaaagacatccgaagacgttgccaagttcagccagatcacaggtcagtctgggactgacgcggtcaacgcattacatgattccatgtcacgattcaatctcagcgctaaagatattcctagcgtgcttgatgcctttgctgcagcgtctcagcggacaggtgtaccagttgccgaccttgaagaagatgcatcaaaggcatacccagccttcaaacaattgcacattagtcttcagcagggaattccactacttgcgtcctggagcaaatctgggattgattcttccacagtgctcaagggcatgcagaaggcattctctgccgctaaaactgagaacaaatctttcagcgatgtcatgacgcaatctttcaaaggaatcaaagatgccaagacagaccaagatgcttttaacattgcaattcaaacatttggcgccaagtcaggtccacagatggctcaagccatccgtgatggcaaagtttcacttgatggtctaaaaaaatcagcccaagacactggtggaaccgtctcgaaatcttttaagcagaccttggatccagtagacaaggccaaacaagctcagaaagaatacgaacagactatgggcaagattggtggaacaattcaagagaccctattgcctgtgatcaagaggcttctgccaattgtcaaaggtgtcagtgatgcattccataaggcaccagcacccgtgaaagcgctggttgttgcgtttggtgcgatcactgtcgcacttggtgtcttggcaccagttatcactgcagttgcaacagttctaccaatgctcggtgttggcgcgactgctgccggtacaggggctggcctaggagctgcaggcatgggagcttttatggccacgctcctgccgtttgtcggagtgattgcggctgtaattgccgcgattaccgcagtcgttttggttatcaagaactggggtgcgattgtcacttggctcaagggtgtttggagtactgttaccagtttcttcaagcagttgtggaatggtatcaagcaaatcttcacgattgcgattaatgccattaccaattttttgaagccagcttttaaagctgctgtaaatgtcattaagtcaatttggaacggtattaagtccttcttttctgctttatggaacggaatcaaagtaatctttacggtggcgattaccgctattgctgtcattattggtacgtatctcaatatctggaagaccattattacgaccgcaatgaatttaattaagggtatcatcaccaaggtttggaatggtattaaatcattctttgggccaatcctatccagcataggtaacgtgatccggagtgcatggaatgctattagtagtgttacctctagtgtgttcaatagggttaaaagtgttgtttcaagcatttggaacaatatcaagaatgtcgtttcaaatgttgttaatgcagtcaagtctgttgtatctaatgcatggaacgcagttagttcgactacttcaaacattttcaacggggttaaaagtgcagtatcaaatgtgtggaacagcattaaatcgactatctcaaatgttgtgggaggtattagaaatgctatttcaagtgcttggaatgcggttagttctgtgacatctaacgtctggaacagtatcaaaaatgcaatctctgggccaatcaatactgcaaaagatatcgttcgaggagcgattgacgccattcgaggtttcttcaacttcagtatcaactggccacatattccaatgccgcatttcagcatccaacccagtggttggtctgttggtgatcttttgcatggatctatccctcatttgggtattgactggtacgcacaaggtggcattatgacgcagccgactatgtttgccaataacaatggccgggcacaggttggtggcgaagctgggccggagggcgttattccgctgaacgatgatacgtggaataagatgggtgcagctattgcggctcatatgccatcccagggaccaattacgctgcaggtggatggccgcacgtttgcgactatcaccggtccatacacctcggactacttgaaacagcaggatgcaactcaaaactttagctatggaaggaggctttgatgacggatggttgaattaattctggacggtcaatctctggcccagtctgtgccggggacgttggtcaccaagaagccaaacattcccgcagctcagcgcgatgtgaagttcacagacgtgcctggccgtttgagtggttcattaaccgagaaacggggttggaaggatattacttggtcaccagaactacaactcgtggacttcaagacgctcaaccagtcatggcggaagacacggcagttactgcaatccgcgtcgaagctagtgttgagtgatgaccccgacttctatcggctcatcaagtcagtcacgatcggcgagttttcggtagacgatgtggaggtcagtggctcctacaagcccagcttcactttggatccgcttgagtatcagatgactgatccaaagacgttcaaggctaactttgacatcgtgaaccccggtaacgtggcagcggaaccattgctcaccgtgttagggtctggaacagccaagatctccgtgaacacgaaccagttctcaatcgacagcctgacagcgcctgtcactctcgactgtgctaaacacacggcgaccatggctgacaaggatatcacaacctcgacagcgggtgattggccgctctttgtaccaggtgtcaatcatgtcattttgaccggcgtcacaagtatcacagtgcaacctaggtggtgttatgtatgagtaccgatattgaactctatccgcgtgaccagactgatttcagtcaccacggctatgctttggacgacatcagcaatgatatcgtcacttggcagctcaacgcgaagttcaccttgacgttcgattatccgatgtttagcgaacatgctggagacctcgtggctgaaaatatcgtgcgcgtgccagttccggggggcaaggctgcttttcgaatcgcgcaagtgatcaagtccatgggtcatcttagcatcactgcttatcacgtgttctgggatcttaacgatgatttcatcgcggacaccaacatcgttgacaaagatggccagggcgcacttgatcagatcatgcgcgctgccaactatccaactggcttcaaagttctatcaacaatcggaaatgtaaccaatgcccggctggttagaatgtcaatcatcaaggcacttttgggaacggatgacaactcgtttcttaaccgctggggtggtgaattcgattggcaggactttagtttcagcgtcaaccctcgtctaggaaaagatcgtggtgttcattttgaatatgcacacaacttgaccgggtacgaagcgaccaaggacagtagtggtatcattacgcgactgctgccagaaggctacaatggccttttactgcctgagttgtatgttgacagccccaagttaggcaattatcgcaaaccgaagattggtaccaaaacctatcaggacatcaaggccattgacgaaacacaggcaacaggggatcaaaaaggtgctgttccggttcaagaagcgtacgagttacttcgtgctgccgctacgaaagagttctccgaaagtcatattgatgaggccaagtggacgtacaagttgaatgtggcgttgcttgagaatactgaagagtacaaggatttaagcatcactaccactgtgttgccaggcgatacggtaaccatcacgcacaagcttgatgatattgatgtgagagcgcgtttgactggatatacctggcaaccgtcaaatcacagctatctaacacagacgtacgacagtacatcgcggccagatgttgcatatagcaatctcagtagccaggtcaacgagatcaagtcacagattgagttagttgataaggtcgtgattgcgaaggcaacaaatggcatgaattcaacaggatggggagatcaatcgccggtcgatctgaatattgctggtaaaaccggtgacgtatactatcaaacgactgccaagggaacaattatgtggctctttcatgacggccaatggaatgccgaaaccggtgacgcttttggcaccgaggttcagaagaaggttgacaccgcaatcgcggatgttgctgctgccaaacaagctgccaatgatgctgtggaaaaagcaaacagtaacaaggatttggtggatctgagcaatcaaaccgccaatgctgccaagaccgccgctgacgctgccaaggcgcttgcaactcagaccaatgcgggcttgacagctgtccagtctcaagctgcctctgcggtctccagtgccactaacgccatggcaactgccaattcgactttggccactgtgacggatcagaagtctacgatcaccaagttggtcacaaaaaccgatgacttagccggaacgattgccaccatggccacaaaaacggacgtcaataaattaaccggccaagtgaccactgcacagacgctggctcagcaggcagcggatggattgaggctgaaagcagacacgacaactgtcaacaccctcaacgggacagtcaatcagttgtccagtgatctcaaagtggcaagtgatagactcgcactgacgatgacgcgaaatgacgtcactgggatgctgacaccgtacgcaacacagaactggacgcaaggacagatcagtgcaacagcaagtcagttcaacgtccaactgagtagtgttaaatcatctgtaggtgacatcaatcaggccggcggaaatcttgtcctcgactctgattttgaaggggatgctgttggacagcagccggattactgggatggtggcctcgttgtgaccaacggtgagccgaaccacgatctcaataagtcgaaacagtgcatgcaaattgtcggatcagttgatggcaaccaagaccttgcgttactttactatactgccgtttctcaagtggactattatgtcgcgtttaagacacgttggcagagccttgatcagaaaggctcgctgcgtctctacatctttgagtacgactcgaacaaaaagctgatcggtccgaaagcagtgattgttaatgacaccccagcaaattggcgctccttcagcaccacttacacgccatctgttgactgtcgttttgtcaaggtcggtgtgacgtacacagcggctcagtccaacatgcttgcttggtttgacgacattgagatgcgtgtatactcaccgacgatgacccagtacaacaacttgaatgtcacggttgccggtttgaacaacacatccgtcaaaaaaacagagctggctacggtgacgaaccaactgaatgtcacaactgatgggctctcaaatctaacgaccaaggttactgatcaaggcacgcagatcacctcagttcaggcgaacatcgaaaatatcaagacaacgatgacaaactatcaaggacagaccaccactgccttgcagactttacaagggttccagaccacagcgacaaagcagcttgggaatcttcaggcccaacaaactttactctccaaccaatggacatctgtgatcggtatggggtcgaatctgatggttgatggcgattttgaagccgacaactcgggagcacctctgtattggtcaccgaatggcatcatcaccggcaacatcgtcccaaatgaaaacaattcatcggggaaggtacttcaggtcaacgggctcgcaagtggcaacaatgatgtggtgtcaaatgtcttcatcccggttcaagccggaacacaatatcgactcacattcaagtcgcgttggaatgctggtgaccagcttggcacgctcattgcttatgccttcacctatgatgctgcgaagaaacttatcgcccctaggggactatcgtgggatgaaacaccccatcactggaggacgctcactgcgacttggacacctgaagatgctgtcagctatatcaggcttggcttcacttacaacggcgcacaatcggcttcttcattcattcaggttgatgatgtttattttgcggtggataatgccaacaactcacagatcactcagctacaagatgcaatcaacttgcgtgtctcaaagggcgatgtgcttagtcagattaatctggaagccaaccgtactctgattcaaagcggcaagcttgttctagatgcaccaacagttgtctttacaggcaatgccttcatcccctcagcagcgatcgcaagtttgtctgctgacaagatcaccaccgggacgttgaatgcggccaatcttaacgtgatcaacctgaacgcatcagctattgtgactggcacgatttatggccctaacttggccatcaatttgaatacaggaatggttgagttccagaaaggtcgcatacactcaactgacaacaacattgatatcaacatcgaccaaaaatatatatccgtaacggacagcaacaacagtgttttgcttaagggcggatcaatgacatttacccaaccctatgcttttgacacggatcagacaccttatttgactatcgataatgtcggatcaagtcaaactcttggaaggggcgctgaaatcgtaggccgtgatgttttaaccgtctctgtttctggagaaaacaactcttttcttagtggggtaccacttttccaaaaagatttcagtggtatttcgatttcaaaaaactatgacactgttgtaggtggcgctaatcgtggtgtgagaatcatcggaggcggatcatattcaacgggtttgggaatgtctaccgttccatctattatggttggctacaacgatggcgcagtaactggaaaaggaagtggaggaacacgcattaacattgaagctgactacgtgcatataccttctgcgtggtcaaaaacaacctcatcatctccaaacgcatttgttgcttctgatggtgctctcgtccgcagcacgtctgccagcaagtacaaggtcaacattaagcgcgatcgttcaaccgagttggctgagcagctgctgacgttaccgacggctcactggctggacaaggcagccatggagcgatatgcaagcggcgagcaaaaagagttaccacagaccaactttggcctgattgctgaggatttggaagctgccggccttgaggatctggttgtccgtgggccagatggtgagcttgaagggatccagtacgaccggatcgcggcagcgctcttgccactgctggctcaaatgaaaactgaaatcgatgaactcaaagcgacggcataggctggcgcttttaatttgggaggaaaacatgaaaatcacacttgaaaatgcaaatattgctaacgtatacagacttgttgaacaaataaaagttaagggcagggatgctctggcgcttgccaagttcatcaaattgttaaagcaaactttgaaatctgctggtgaggatgagcaagccttagtcgctcagtatgctcttaaagacgagaacggagaatcaaaaacagattcgaacggtaatattcagctgaatcccgacctagctcgtgagtacaacaaggttcatggtgaatggcttgagcagaaggccgaaatcgaaggtggtacctatgtgaatcacattgacgatgttcagcgaatcatcagtgactacgttgatgagaacgaaataggcggacccgatcttgatgcatatttagcgttgtatgaagcattcgaaaaaggagagaaataatcatggcattgaaaactaacaagagcatcagtctcacaggtacatccaccattggtgatgttcaggtcgcttatttgaacgcaactattgaccaagaaggaaatggcgccaatacggtcaatcagtcaattcagaatcaggcactctatgacgcgaacaagaaagaagttcgagctgacattgccaaatttcagcaattgctttatgacacagaggattctttgacttctgaaaaaaagggcacagatagcagcaaaacattggaaaattgagtcaactataactagccgttacatccttatggaagaagtgagaaagtgacatttttaggatatacgatggctgactgggcggagttcatatcaatcataggggtgggtgtaagtgcgggcagctggctgttcaaaaagattgccttagatccattgcgttctgatattcaaatgctttcagagacaattaatcgtcagctaaaactgcatgaacaatcgctggcagacttgaatgctcatctgaaaacacacgatgacgagcttggcagtcactcggtaagaatcactcgattagaagctaacgtaggcattaaaggagaagataaccatgaagattaattggagagtacgagtattgagcgtcaaattctggctggccgttgtgccagcttctttgttggtagttcaaacggtggcggcagtcttcggttacaactgggactttgctagtttgggtaaggaactcactgcagtggtcaatgcagtgtttgcattattgaccattgtcggggtagccgttgatccaaccacagagggtgtcggtgacagccagcaggcgttagcttacccagcactcattactaccaaggcggctaagatcaaggcgttagaggatcagattaaggcactgcaagcagataaagcagctgatcaggcaacttctgctgctagtgaagtggttccagagacgtcttctgcagcaccggcggagtcagctccggcatctgttgctccagcagctagtgaggaggcaaaatagtatgagttataccatcaacaaagaatttgctttgggtgcaaatgaaggctcatcgcaagtagctaatcgactttacattatcctacatgatgtaggtgccgaatctggcgcgcgtgcaaatgccgcttacttcaaaaacaatattgctgctgaagttgcttatacggcatttgttgtaggcgatggcggtcaggtttatcaagttggtgaacctggttatgttcagtggggcgctgggacagtggcaaatgctaacagcccggtccaaattgaattgggccacactagtgatcccgaaactttcaagaaggattatgccgtttatattgagcttgcacgtgatatggctgctcgatatggcattccgactagtttggacgctggcggtgctggaacgccgggcatcaagtctcatttgtgggtaacgcagcatatttggggtgaccacactgatccgtatgggtatctagcacgttggggcattacaaaggagaagctggcggctgaccttgctaatgggacaactactgtagatgcatctaagagcgcaccagcagcacaaagcgcgcgtccacaagcaattgtaactagaaatgtcaacgtagcctacggtctgcatctgctcggtgtccgttggcttgatgaggtgaccaacttcggatctggtgacaacggttttgctggtatgcctaattatcagcatgatctgctgtacatcaaagttgatcatggtagcgttaagtatcgcgtccacacagttcaaagtggttggctgccttgggtagccaaaggtgatcgcaatgatacggtcaacggctgtgccggtaatgctggcgaagtgattgatggagtccagatcatctttcttactcctgctggtgagtcgtaccagcaagcgtattaccgcagtcagacgacacaacgggctggctggctcggcgttgtatgtgatgatggcacgagtttgccacagtacacagacacatacgccggcatgtttggagaaccgcttgatcgtttgcaaatcagcattagttcgatcaatccgttttaagtacattacaaaaagtcctctgctcgctaacgcgggtggagggcttatttttgtgcataaattacatagttgcaaaacacaagaagaattgtaaaatcgctgcaacaatgcgattatgacattcaaaatggtacttttagcgcaaataatctagttattttaattgcactttattttgagaaattttaattgagaccaaattgagaccaagaacgttataaacactgatactataggcatatattgttcctgttcgcggcattctcgtgatttttaacggcggttaaaaatcgaaatgcccgtgtaacaacgttttagccttcctaattgatgttaggggggctatttttgtgtgcaaaatgtgaacaagcaatgacttatgccttgatgcaagtcatcaggtctggaagctgtgttatattcgtcatgaggcgactgagcaagcggcaaggtgaatgaagagtataaacatgatgtggcctgaaatgaagcacgatcaatagttgaaagggatgatcgctggatgatttattttcttgatgaatacttacttgcaaagaactcaagtgttgaacatgctgcgttgaaacgactggctttgttcaaacaatttaagcaaccagttaagattctgacgcgtgattacgatcgtttgagtgtccaaaccttgcgcaagcttggcgttgctcagatggatgtgcgcaacatgttcgactattttcagcatgtgcccgccgaccgaccggaaaaagctgtgcataatgatgagatcaatttgccgacaatggatgaagtttcagtcgatgctaaccaaagtcaggtcacgaacggcgaccggctgcgacggcaggtcggttatattccaggaaccgtcggccatgtttattatcaaaactttttggacgatcaaggcaatcttgtggaatgcgatctttgggacgcccgagggtttaaatcggccactcagtattttggacaggatggcttgttagcctttgaacgctactatgatcttcgaggtgtaccagtgctggacatttattatgctggtgatcatgctggtcagattcagatcagccggattgttttaaaaggccaaacccttaaagaagatcatgagtttgatacattgggagagttgtttagctattttcttgatcaacttgcgactgaagattcagaaacaacgatttttatcagtgatcgtccggggattggcgttcaaccgctactagcaatgcatgcagccgcaaagaagtttgtttacatacccattaatcatgttttaacacctgacaaaccgcggcaaggcgaacttgatggttttattcaacctgtgctgcagcatccccaaaaagtagatggcttaattgtacaaacgccgcagcagcaacatgatcttcatgatcgttttccgaaagttcgggtggcggcgattccagcggtgacatttgatccggctttgacagcgcgttcggcggccgccgctgcaagcaagaaaatcctgtttgtgggtcgactgtcgcctgataagcaacttgatcagctacttcgggcagtcgctttggcgaatcggcaggtgtctggcgtgacgcttgatttgtttggttacggtgatgaacaatatcaaaccgcgatgaggcagcttgcggatcgtttagagattggcagtcaagtgacatttaagggttaccagtcatctctggctgatcagtacccgcaatatgccttgttggtcaatacgaatttgacagatggtggtccgttggcgttggttgaagcacaaacccatggactgccagtggtgagttatcgcttttcctatggacctagtgcctgtgtgattgatcaggaaaccggttatcttatcaagcaaggacgcgtcaatgaccttgctgaagcgattgtgagactgctaaagcggccagagcagtcacaacaattcggcgatcatgccagagcactggcgcaaaagcagctagcgcctgaaaaagtctacgcccgctggcaagcatttcttggactggagagttaacccgacaaaacggtaaggaggttcaggatgtattattttttaaatgatcaaatggcctatgccaagtctggtattgaaggcgcggaaattcagcggttgcagcttttcaaagcgaaccagacgccagcaaagattgttacccggcaatttgctttagatctacacgatgttttgaaagatgcaggcattgacgatactgattttatcaatctgtttgattacttttgcgacctgctgagcacaccgtggcagcaggtaacggttgcagacgtttgccagccgactgcgggcgtgacccgccggcgtgaaggacgccaggtgatcttcagccgcggttcccgagtcattcgaattgtttatttgcgcgaaaaggcggggcgtgagcaagaggttagcaatgttcaatactttgatgtgaccggccgaacgatcaaaatgagttggtgggacacgcgaggcaaccattgtttggatcagtattttgatcaaggcggcaaaattttccaagaacactatttggatcgtcatggtcgcacgcggcttgaaaaactgcattatttaaatcatagccagcaagaaaaattttcgtggaaattggttgattttcatggtgtggattatttatttgatgggcttcatgatttgacaaggttcttctatgatcaactgaatcaggtagatggcggctataatgtcttcgtgtgcgatcggacgacggaaactggctggggcttgttgcacatgacgacaccggcgctcaaagttttgcatctgcacaataaccatgttgccgggaatgaggacgtgctgcatgcgaagctgaataatttttatgctagtgccttgacccatttgaatcgctgggacgctgtgattgtgccgacaccgcagcaggcgcaggatatggccgcccggtttggcacggccacgccgattttcacgattcgagttgcttttgttaaggcggcagatgtagcggctaatcgcctcccgttttcacaacgcgaacaacatctggtggtgcatgttgcgcgattggcaccggaaaaacagcaggcaagttcaattcgggcatttgcccaagttgtgaaggccattccggatgctaaacttgaactctggggttatgccaatggtgatatggcgccaaaactacatgctctggttgaaaagctgcatctcgcggatcacgttttctttaagggttatactcgcgacatagcggccgtctacaatcgtgcacagttaggactgttgccttccagtgccgaaggatttccgctaaccttgattgaagcacaggcacacggattaccgatgatcgcaaatgacattcactatgggccagccgatattttggccaacggtaaaagcgggcttttgacgcaaaatggtgacattgatggtttagcaaatgcgatcattgggttattgaatgattcaactaagctggcccagtttagcgcggctgcctatgacaatgctttgcgattcactgatacgagcacatttgttcagtggcagaaactcatggcgtttgcggcaaagaaaaagacaaggctggcggcctttgagcatgttgattaggcaccggtcatggcaatgagtggcgtttttactgacaactgttcaaaaaatggtaggatgaggcgtaagcttttaccaagaaatggaggctaaccaatgtcaatttatgattatgaggtcacattagaagatggctcgcaatatgctttgagcaaatacaagggtcgaccaatgttgatcgtgaacactgccacaaaatgcggcttcgcgcctcagtttgatggtttggagaaattgtatgacaagttcaaggatcaaggtttggtagtgctaggttttccttctgatcaatttaaacaggaactggctgatggtcatgcagcggccgaggcttgccggttgaaatacggtgtgagttttccaatgcatgatttgattaaggtgaacggcaaagaagcagctccactatttcaataccttaaaacccaagcccctggtgaactaggcaagtccatcaaatggaactttacgaagtttttggttgatcgtgatggtcaagttgtcgcccgctttgcaccaaaaacaaaaccagaagcgattgaaccagcagtggagaagcttcttggctaacttttgtcagttgcacgtggggctggttcacgctctgttttaaacgcgtttgccagcccagagacctgcgtgtaaggaccttgggtgcaatgaccaaagcccggccatcacacccaaggccgcttacactccggtctctcccgggctggttcacgctctgttctaaacgcgttcgcaggcccagaaacctgcacataaggacctcggacataaatggccaaagtccagccatttatgtccgaggccacttatgctccggtttctaaccgggcctgctcacgctctggacactcatgcatgtgatgcgtacaatgacatcaaaagtaagaaagcagggatgattgatggaagaattgccagctgatgtagcggcttttgttgaaacacatttggttgatcggcgcaatagtaacgccgtgaagtgggatggtttggcaggtgaatttggccgcacggatctcctgccgatgtggattgccgataccgaatttaaagcacctcaggcggtgattgacgccttaaccgctcgcattcaagaaggaacttttggctattccattcggccacaatcctactatgatgccttcattgattgggaaaagactcgccatggcgtgacggtgcagccggaatggatgcgttttggtgtcggtgtggttaaatcgctgtatgccatggtcaattggctgaccgaacccggcgatccagttttaatcatgcagcctgtctattatcccttcatgaatgcgattaaggatcttggtcgcaaagtggtctcggttgatcttcaattaactgctgatggctggcggatagattttgatcaattggataaaacgcttgcgacgcaaaacattaaagccatgattttttgctcgccacataatccggtcggtcgagtttggacccgtgaagaactggaacggctttttgcgatcacgagtcaccatgatgtcacggtggtatctgatgagattcacggcgatttggaagttagtgggccaaaattcacctctgctttgcaagtagctgagggtccggcacgcagtcggcttgtcgtcctgaatgcaccgtcgaagacctttaatcttgcggctttactgaattcgcatattattattccggatgaaaagttgcgcacggcttatgatgatttcatcaaacagttgcatccagtagataccagccttttgggacaggtcgccggtgaggcagcctatcgtcacggtggcgcgtggttagacaaggtgcttcaagttgtccgatataactaccaacagttgctaaccggtctgaagcagagcgctccgaaggctacagttgcggacttgcagggcacctatcttgcctatgtggatattggtgcctatgttgcgccagccaaaattaaatcatttgttgaagatgtttgcggactggcagttgattacggcgcatggttctcccccaaaacagctacgtatattcgcttgaacttagccaccgaccccaaacttgttgccgaggcgattcagcgtttaactgagcacttggctcagccgcaactttaattgaaacaaaacaaaacaccctgttaacgcaaggcatgttgactcattaccaaacatacaaggtttggtgctgagacagcgatgcttgctgatggcagggtgtttttgtgtgagtagtcttagttaacagtcactaagggtaattgatgattaaatgattatcattcatattatgatcctgtacgatttctttaagatatcgccgcagcattggtgagcgttccaaaacggcccaacccggatcggcttttaatcgcttgagttcagctttatcgggatgatcatcgcctgtgaaaaagcgccagttcaagacgcccatcagttttgcggcagcatccaaatcatgctgattcgtcacgccattatccatgagatccccatatgcaagaccttcgccatcttggagaaagagttgcttcagataccgttgataatgtagcagatcaggattttttcgttgcttggcggttaagtaaggtgtgggatcagtcgcatgcttttgataggtgattcggttaggcgtgaacgtcaccaccccataactggcagggctgatcgaaaatgcgccgctgacaacttcaatcgttggacattgcccgtccggatcgcggctgatgtcttgcgcatggatgtgtccggaaaaaagcaacggaacatggtaagctttcagcaacgttttgagttgatcgctgttgtccaaaacaaatccttgattcaccgcttcattgtgggcatatagattgtggtgcatgaaaacaatcgacttgcgatgggccttttgaccagcagctaattgctggcgaacccatttcatggtctgcggtgtgagcttaccaccagtgttcggggggcgattggaaggttcgatcgtataaatattgctgtccagcatcagcaattgataattgcggttaaggttgacgcgatagctcaaactattcggatcctgcgcaactgcctgctcataactggtatgaaaaatattgcgccaatcgctagggctgatttgttctgtcagtagttgtcgtttgcccttgtaggctcgtgcccaaccatcgtaaatatcatgattgccagggatgatcaacaccttcgtaccattggcaacaagtggttgtaggcggcgcatgatactttcggcactggctttttcgccgttgaacgtgacatcaccggtgatgacgagggctgtcgggcgggcttttaaggcgttttgaaccaaagcattgatagcaacgggctgatagtccatatcttttcctgctgcagaacgtttgatttgggtataagcagtcttttcatcatgtagacttggggcaataaagtgggtatcgctgagcacccaaatggttgcctgtgaactattggtgagtgggcgatcacgatcagggtgaatttgccccaagacgattgcaaagatcagcattaaaaataacgctgctacatatttgactgctttcattttctgcctccgtacctagtttaccattgatcaaggtaacaccagcaggtcattttgagtggtgtcaaaaaatttttttgataattaacttgttggtgacttaaaaacgttactgaccgagagcgggattatggtaaaataaagccacatttgaccacgatagcgtttagagagaggacatatacacctatgcaagtaatcgtaacggttatcggtaccgacaaagttgggatcatcgcacaagtaaccactgctttagcagatttagatgttaatattttggatgtttcacagactatcatgcaaggtgcatttacgatgatgctgctagctaaaattccagataatggcaatttcaatacggtaaaaagtcaattggcgaccttgggtgatcaaattggcgttgagatcaaagtagcccgtcaagagatttttgatgccatgcatcggctttaatatgcgttggatcggcaatcgtacttatcagagctaaaggagccagtgatggaaactcaacaaattaaagaaaccattgaaatgatcagtgaagagaatctggatatccgaacgattaccatggggatttccttgttggattgtgtaactggtgacctgcaaaccacagccgacaaagtatatgccaaaattatggcaaaagctgccaatctggtgccggtagctgacgccattagcgacgaatacggaattccaattgtcaacaaacgtattagcgtgaccccggtcagcttgctagctggcgcggatcaaaacctcgattttcgcccgattgcccaagcgatggatcgagctgcaaaagatttaggtgtggatttaattgggggctataccgctctcgttcaaaacggtagtacgccagcagaaactgcattgatgaagagtttgccggaggtgttagacaccacggaacgcgtttgtgcgtccgtgaacatcggcagtacacgcagcggtttgaacatggacgctgttaagttgatgggcacggtcgtcaaagaggttgccatgcgcaagccgcagaatgcgatgaaactggtggtattctgcaatgctgttgaagacaatccgtttatggcaggtgctttttgggggatttcagaaggtgatgttgccatcaacacaggtgtttccggtcccggtgttgtagaacgggcgatcgcggccaaaccggcggcaagttttgaagagatctgtgaaacgattaaacaaaccgcctttaaagtgtcacggatgggccaatttgtcggtaaagttgctgcggatcgccttgatgtaccgtttaacattgttgacctcagtttggcaccaacaccggcaaaaggtgactcagtggcgcaaattctggaaacaatgggactcagtcatgttggcacaccaggcacaacggcagcgttggcgttgctaaacgatgcagtcaaaaaaggcggcatcatggcggctgaacgtgtcggcggattatcaggtgccttcattccggtttctgaggatgctaatatgatcaccgcagcggccaagggtcaaatcagtctggaaaaactagaagcgatgacggcggtttgttcagttggcttggatatggttgcggtgcctggcgacactcctgacgccacgattagcggcatgattgccgacgaggctgctatcgggatgattaacaacaagacgacggcagtcagagtgattccagttcctggtaagcaggtgggcgacaccgttgaattcggcggtattttcggtactgcgccgatcatggcaattaacgatggcgatgcgcagcagtttattaatcgtggtggccgtatcccagccccgatccatagctttaagaactaacgcgtctcatttttaaacgatccgacttaggccttgttgttgctggtaattgccagtagcagcagggctttttggttgcggtgcgtaatgttttgatgaggtgaatcgtatgtttgtagccctagataaaaacaatcaacgtgtcacattgacaggtcatgcccaggcggccaatttaacacaccaaacctttcactgtcctatttgcaagcaggtcgttcgcatcaaaaacggaaccgtaatgcctgcccattttgctcaccgaagtcaaccaatgggtgagggtgaaccagagagtatagagcacctaactggcaaatggtggttggcgtcttggctcaaacagcatggcgaacaggcaacgttggaatactatgatgcaaccattcgccagcgcgcagatcttttggttgcaagtaaaccgccgagggtattggaatttcaagcaagcccgctaagcgtgccagatctgcaaaaacggacaatgatgtatcatgcgcgtagttggcaagtgacatgggtattgggtcatcgatactggcatcctgaaggcaagatacaagcacgaaagtttttgagcatcgaagatcatcggctaactttgtggcatttacagacaacggttggtgagttggtacggattcagtttggaaatgaaggccgttggctaacgcgctttcagcatgatgatccgccaactcaaacttggcaggcagaatcgacttatccgcaacgacaaattcggcagattgccatcagtttacaaaagcgggtgcaaccgtggatgacgctgcaagcagctgcttatcaacagggccgcaatttgaatggctctccatggttcgttcacagtcggccccatgtgttacggcattttggtgttccagaactacaactgcgactcaaatggctgttgatctttgaaggacagccttttaccgcgactgccaaccgtcaattttggcaagcggccctgccgaatatctggacgcctttgttgccagctggcacgctcgggaaaatgatgggtgcccactggctgcaagtgttgctggcagaaggcttcgttgttcaggaagatggttgtcgttatcagtggcagcgtttgcctgtttggtttgccgatcttgagcgaaaattggccatgaaaaaagactttgcttaaggcaaagtctgatgaggctgattgcttatcacgattcgcaaggtgggaaaatgggacggtttgtgcgcttatggaaacgtgtttgtagacccagaaaccggcatgtaaggacgctgaacacaatgcctgaagaccggtcatcacttcagaccactgataggccggtttctagccgagtctgttcacgctctaaaaaattctaaagttgctccccatgttttcgggccgttcggtgaagaaaccggcgggatctgttcggatgagatcgcaaagatgtgggatgagtgctgggtcaccgatttgttcgatcaaaacagcatggccgtcatctactttgcgatcggtgtcaacaatgacaagggaaggcgtttgagtgatacccatttggttagcagttcgttgatcggagtcaaagcccattttaacttcggaacgctgacgatcttcataaaacatttcttgatccagcttacatttgtcgagcatctttgccacaaaggccgcatcatattggtattgaaccagaggtgcgtgttgttgtagccgcaacaagagcatccgtgcttttttgttgccttgatattgtgcagccttataatccaacgcaaggttgtaagctgcacggagcagctggttgcgtttagcaagattacctacgctcagttgctcacgtttcataaattgttccatgatatctaaattaagaacgggaacgaagtggacgcgcacttcctgctggaatttatccaattgtctgagtaatttctgttcagtgcccagacagacgctcccgattggattgaaaaaaagaaaaatttctatcacgttaacggcctccaattcgccaacaacaaattcttacatttactttatcagaaaatgagcagggtacaattaatcagcttgtgaatcgtgcacatgcatgaatgcgcgctgaactttgttgataaccggccgtttttcaatgttgaattggtgcaacaaagtatcgtagaaaacttgagcttgtggcaggtcatggtactccatttccaactcaaaatcagaggtgttgtccatgtaaaaagtctgatcgagtgtcaacaaacctgctttaagatgcgctacacggcgggtcgtttttgcttgggtttgcggatgaaccgctgcggggtcaatttcacgggctgctagtgccgttgtgacttgaccggttttaagttgaccttgatcaatcaaggagcgggcttcaactgaagtcagcggatcggtaatttcttccaaatcacgatgttgattcttattaggaacttttaaggtttgttccgcacgatctttaaactgacgaatgcgcaagcctaggcctgcctttttgacggcgccagtcggtgtatcgtaataggtattcatttgactgaagcccggctcaaaatcaaactgattgagaatcgctagaaaatcagtctttgttaaagttgttttaaattcctgttcgcgagaaattgacatgaactgcctccaaagacaaagggcaacggtgacgagacaaaaatatgatagaatggtggtcgtgagtgacttggctggcaagaaagctacgggttgccgtacttcttaaccagtctggctggaatatagccgtcgtttgtcggccaagcctcacgcaacgtatcatcagtagtttagtatgggagggccagcaatgcaaagggactgggatagtttcttaatgccgtatgaacaagcagtcggggaattgaaaattaaatttcgcggtatgcgtaaacaatttcaacaggccaatgaacacacacccatcgaatttgtgacggggcgggttaaaccggtcagttcgattattgaaaaacaaagtcggcgttttatcagtgacgaacttttggaacaggatatgcaggacattgctggtctgcgaatcatgtgtcagtttgttgaagacatttatcaagtcgtggcactccttcgtcaacgcacagacatgaacatcgtggaagaacgcgattacgtgaccaacgtgaagccttctggttaccgcagttatcatgtggtgattgaatatccagtgcaactcatccatggtgaaaaaaagattttggcggaagtccagattcgaaccatgtccatgaacttctgggcaacgattgagcacagcctgaattacaaatataatggcgaatttccggatactttgaaggcgcggctcaagcgggcagcggaggcttcctttatgttggataaagagatgtcagatattcgtgaagaaattcaagaagcccagcatctgtttgtttatggtaaagggcaacagccacattcgaaaacaaaggatcaccatgacgataaaaaggatgagtaagatgcgtgtgacagttttccataatagcatacctgcctcaatcacggctgcgcaaaagctgacgaagcttttgaagagcggtcactttgagcttgatgagcggcatcccgaggtggtcgttaccatcggcggtgatggtacgctcctttcggcctttcatcgctatgcggatcagttaaactcaattcgcttcatcggtgtgcatacaggccatttgggtttttacacagactggcgggattttgaaattgaagatttagttatcgccttaaaagaagactctggacaaagcgttagctatccacttttggatgttcaggcgacttatgctgacgcgaccagtgctcattatctagcattgaatgagtcaaccttgaagcgtttaaacggtactatgcggacggaagtctatatcaaaggcgatttctttgagagcttccgcggggatggcttgtgtgtgtcgacgccaactggatccacagcttacagtaagtctaacggcggtgctgtgattcatccgcgattggatgcgttgcaaatgaccgaaattgcgtccattaataatcgggtttttcgtaccctcagttcgccgattatcacggcaccagacgagtgggtgacattggagccgacaggtcgcgatgattacgtcatgactgtggatcagttcgtcatcaatccaccaacaatcaaacaaattcggtataaaattgcgaaagaacggattcattttgcacgctaccggcatatgcatttttgggatcgtgttgaagacgcctttatcggagccaaacactgatgcgatttgaatggcagtatgagggaccgccgctgaaattggcggcttttttaaaacaacagggtttttcccgtgcacagcttaagaaacttcgttatcaaggcggatttgtttttgtcaacaaacggcaacggcataccgcttatccggtgcgctcgggggacagaattttggtacagacagcacctgagcacgcggcagacagtgtggtgccttattcgcatgatttggccatcagttacgaggatgacgattatctgatagtgaataaaccggccggggtggcatctattccagcggttgggcgccaaaataatagcatggcgaatatggtcaaggcttatttaattaaaaccaaggctgaaagtcaggccgttcatgtggtgacacggttggatcgcgacaccagcgggttgatggtctttgccaagcatgggttggcgcacagcttgttggatcagcaattgcacagtcaagactttgtcaaacagtatgtggcaattgtgaccgcacaaacacctttagcaactcatggttggatcgtattgcccattggcgtcagtgacggcttttatatgcgtcgtgttgtaaccgatactggcaaagcttctgtcacggagtatcgaacacttgaccaaaatacggctggggccatgatgcttgtcacgttgcataccgggcggactcatcaaattcgggttcattttgccgcgattggtcatgcgttgtatggtgatggcttatacagtcctgatacgcacggctttaatagacaagcacttcattgtgcccatttgcgtttctggcagccgttgaagcataaactgattgatttacatgctccacttccggctgatatggcaacgttagcggcgaagttgaaattatcgcagcaagattgagccgccgcacaaatttaaacaaggtatgacaaaagccagttcccgaaaattaggaactggcttttaacatactatgattcaggaacataattagcggctccaagcgaactagaagttgcccttgtgataacctgaatcggcatcaaacttgaattgctttttgaggccattggttaaatagatcttcttgtcattggtaatgaaaattgcttgaatatgatcgctgtttttggcattcatgtattgcagaccgccttttaatcccttatcaaaggcagcattggataaggcatcgccatcaacactatttttcgagacaatcgtgactgaggccaagttgttgtcatagggatagccagtctgaggatcgaaaagataaatgtatttatggccattggagattaggtattgctcataggtgccagctgtcacaatggattcgttgctttcaggaatcgtacccactgcagtgccacgcggcgcggtcgggtcttgaatcccaacatgccaatcgcgattggtaccaagcggtgagtgacccatgacaacgacattaccgccaagatcaataatcgctgctgtgacgccatctttggcgagcacggccttcactttgtcagcaacccagcccttggcaatcccgccaaaatcaagccgcatcccctttttggtcagataggcggtattatttttggtatcgagtttgacatcgcgccagttgaccagtggcaaggccttgtcgatctcactttgtgccgggacgcgcgcgccaggcaggccaatttgccacagattggtgacggctccaatggccatgtcgaaactgccattggagttttttgaaaagtagtaggctttttcaagtaagggcataaaatctttaggcactttgaccggcttgattccggcattatcgttgatcttatccaaaaccgaaccgccgcgggttaaagttgcctcggcgtcgacgtgatgaatcatggcaaatccgtcttttaaggcggattttttacctttatcataaattgtcaaagtacaagtggtgcccatgacaaattcattttgtgtgtatggggttttcaagtaagttggactggctgttttttgacagccggacaaagttagaaaaccaataaaagcaagtaaaccgatgacgaattttcgcatgttacataaccctcatttcatctttccctttgaatatcataccgcgcgttatggaaaaagaaagccctggttgtcgctcgtcaaacgtatggcagcaaaaaaggctagttatccaggcggttgcccgcataactagcctttccgtggcgtggttcattagaacgcgattagttttgtaccatgtaaagctttcacacctaatgtctcaccaattgaagcagcgttttgactggtgatcccgccgcctggcaagatgctgattttatcacctgcatagttgatgatggcttgcaggcgtggcaaagtgtcggtgatgggggtggtcaaaggaccgccgtgggtcaagatacgctcgacatcgtgatcggccaaccaatcaattgcggcaaactgcttggtttctggaatggcatcgaaagccatatggaaaacaacggtcatgccagcactggcagcaatgaggctggtcatcgcgtcttcatcaattgcgccatctggtgtcaaagcaccaaaggcaacgccatccacgccaagcgcctgtgcctcaaaaagatcagcttccatgatttttaattcaacatcgttataaacaaagttaccgccacgtggacgaatcatggtgatgaggctacggccatgttcatgaacatattttgtactctctgccataacgcccttagacacagttgtgccaccaaccgctaaattgtcattgagctcaatccgatcagccccggccgcgattgctttaggaatcgatgtataattttcaactgcaatttcttttaacatgacggacctccatttactagcttagataaacatgaccaataagacaatcgcacctaaagcgattcggtaccagccaaacggtttgaagtcatgcgtttgaacaaatttcaacagccacttgatggcaacgatggcgacgaggaaagaaacaatggaacctgtcatcaaaacagcccattgttcaccagagaagccgttgccttgccacaggtatttgccgattttaagaatcgacacgccaaccatggtcggtattgccagaaagaaggaaaattcggtggcaacgtagcgagaagtcccgattagtagggcgcctagaattgtggcgccagatcgtgatgtaccagggacgatagacaagacttggaaaagaccaatcagtaaggcggtttgataagtgatgtctgccagagtggtgatatgcgcgtttttattcttgaggtagttttctagaatgatgaacagcaccccataaatgatcagggttgttgcgactacgagtggtgtatgtaaatgttcatccatccagttgttaagcgggaggccaacaacgactgacggcagaactgcaatgataacttttgcccacagttgccaagttgcgttgcgggctttggctgtcggcttggaaaagggattcagcttattgaaataaagcaatatgacggcgagaatagcgccaaactgaatcacgtactcgaacatattaatgaaatcctgactctgcgataatttaatgacatggtttaccagatcaatatggccggttgaactaatcggcagaaactccgttaacccttcaacgataccgatgatcacggccttgataatgtcaaacataataaccctccaattctcaatgttaacagtatacaaggttttgcaaggcttgccacgttcaactcggaatttatagtcatcttacgtaattcagcaacttttttgggaggtaaaaaaagcccaaccaccaagcaaaacaggtcttggggctgagccaataaaaagttgtatcgatggttaaacataagacagacggtttaacttacttggccgataaaaataaaacattaacggcttctggcgtcggaatatcacgttgaatttcggtcaagagtcccgttttggcatcgcgactatagagtgtgccattactactgttttggttgaccacgagaataaagtgttcagtgagatcgaaattgaaatcacgaggaaaatcgcctgccgtactgatttgttgcaattctgacagatttcggccatccggactgacggcaaaaacggtgatgctattatgaccgcggttggatacataaaggaagcgttgatcactgctcagtcgaatcgcagcagcaccattgtgatcggtgtaatcttccggaatggtcggcaacgttgcaatgagtttgaattgaccagttgccgcatcataatttaggatgctaacctgacttgaaagctcacctagtaaataggcaatcgggttgttgtggttaaaagccaaatggcgagggccaaagccaggttcggtgtgaaaaataaccggatcgctgagtttgccggcatcgctgacagcataggttgttaaggtatcattacccagatcaacgaccgctagtcgctgaaagtcaggggtgacagcagcaaaatgaacatgggcactatcttgttccggtcgcggaccgttaccggtatgcttcacttcatccgttaaagccaaaccatgatcatttttaatgcgatagacattgattcggccttcgtggtaattgctggcataaaccagctgacgattcgcatcaatcgagatatgcgccggggatgaacctgcctgcagtaccttgttgatcaagcgcggtggatcaacatttaggtcataagccgcgacaccgccttgatcaccttctgcgtctaccgcatataaaatattgtcatcagatacggctaagtaggttggtgaacccaaatcagtaatgaatggggcaggggtcggcaaatgcgcttcgtcattatcaaatgtaccggcataaacgcctgcaccgccgtgacgcgtataaccgcctaacaagagtctttgcttcatgttcaagttgctcctttcgaatttgatttgagtatagcatgtttggctgatgcttatgctatgatataaagcgtgagtcaacgtttaatgaaaatagctggccaataaagctatcattaaaggaattttcagacctttaatcaaacgatttgccacagcccataactcagcgccatcatgggccttaacgagatcgcatttatgttggcagcgaagctcagataacaaacacttatgatattaaaaatgacaggcaaacggaggcacgaccatgcaattgacagcaacagtaacagctattggtaaggatgcattgagttccaaggatccgatgattattctctttggaccgcaagcaacagacgcactacgcgacgtcgcggtgatccagcagttcgctgacaagtcagctttggaaaaactggttatcaaggcgggcgaccaattaacaatcgatgatgagacgtttgagatgacttatgtcggtcaacttgctaacagtaacctgaaggcgattgggcacgttaccctgttgttccaagctgtaccagcagacaagccgatgcaaaacgcaatttatttaaaatcgacccatcgaccaacatttaaggttgggacgacactaacttacatcacgcaagccaactaagtgtgacaacgagttcttggatcagttatgcgccagtttctaaccgcttctgcttacggtcaacaaaaaaaagaagatttcaggcgatctatcagcctgaaatcttctttttttaccatgatgccttacgaacacctggaatttgacccttatgcgctagatcacggaaattcaaacgagacattttgaatttgcgcatgtacgcatgcggccgaccatcaagttcatcgcgactgtgcgcgcgaacgggtgaggcattccgcggtaaagcttgcaaggcagcgtaattatgctcagccttgtacttggcacgcaacggggcatatttagcaatcgttgcttcgatcttcttttccttggcaatctttgactttttagccatgtatgcaatcactccttatttgtggtttgtatttaacgttttttaacgacgtgtctgttcgaacagttcaacccacatagcatagcacagccttaagccgctcgcaacacttacaaaaaataagcgtttaatattgatcgccattgaaaatcgaatttttaacaatgacataatcgaccttggtcaaggactcgagatcgcggccaccggcgtaggagacagctgactgcaagtcttcttgcatttcctttaacgtgtcaccaatcttgcctttgacaggtaacaagatttttttgccttcaacgttgtggtgggtgcccttttgatactcggacgctgaaccgtaatattcctgatattccttgccgtcaatgttgacgtgtttgccaggtgtttcttcatggccagcaaaaagggaaccaatcatgcacatggtggcgccaaaacggattgacttggcgatgtcaccattattgcgaatgccgccatcagcaatgatgggtttacgggctgctttggcgcaccaacgaacagcagctaattgccagccgcccgtaccaaaaccggtttttaatttggtgatgcagaccttgccaggaccgatgccgactttggtagcatcggcaccagcgttttcaagttcccggacagcttctggggtgccgacattaccagcaatcacaaaggcatttggcaaataatgtttgatatgttgaatcatgtcaatgaccacctgagcataaccgtgcgcaatatcaatggtgatatagtcaggagtcagctcattagcagccagtgcttcgataaaatcgaactcgtcatccttgacgccgacactgattgaagcgattaagccgcgctttttcatatcgcgaacaaaatccatccggcgttccggctggaagcgatgcataatatagaagtaatcgtgctctgccaaccagatcgccaaaggttcatcgatgatggtttgcatattagcgggaacgactggaatcttgaaagtatgcgggccaaatttcacgctggtatcaacctctttacgtgattgcaccacacacttgttaggaatcatttgaatgtcttcgtaatcaaaaatctgcatgccgttgttcatcggattcatcctttcgcaaaagccgaacattgttaagcattattggtgttattcaaaacaccaagtgctaagatacgcgaaagttttgtaaaagtcaatcaaaagtacatacattcttttttaatgttcgtgttttgataaatgaaaagaaaagccggttgcccggcttagaaaaacgacagtggtaattgatgcggcaaacgaggatgtaacacgtcacagaaggctcagaaaaacttgttgcgccaaaattgaaaggcaagtactaccgcaatggcaacggaaatggcaatggtgataatccagctcaccttcatatcagccaaagggagatgaacattcatcccgtaaaacgagaagaccaaagtgggaatggttaacaaaattgaataagaagttaggaacttcatgacgccgttcatgttattgttaataattgacgagtaggtgtccgccgtttcgttaataatagaattgctaatttgtgccatttcgatggcttgttgattttcgatgatggtgtcttccagaaagtcttggtcgtcttcatccaaaccaagaggattgctgcgttttaattgttcgaggacgttgcggtcggtccgcaaactcatcataaaataaaccagtgaccgttgaatgcccatcaagccgtagagttcttcgttgcggaggctgcgttgcagtttattttcattggcttcgcgtgccttgtttagatcacgtaggtaggttaggtaactgattgaaatctggtaaaggaactgcagcacggaccgattttgtcggcgagggtcgaagttactgactttaccttctgcaaaaagactgaggagtggaatcggctcgccgttgatggtgatcaccgcagtattagtgatgatgatcgctagcggagccgtttcgtacaccacctttttacgtgcgtcccgtgtgacgatgggcatgtcgaaaataaacagatggctatcattatcttcgtcgtattcgtaacgggcaccttcatcgggatcaaggccgtacaaaaggaaagcttctgagagcttagctttgtcctgtagttgctgacgttctgcaggagtaggatcaaccacattgatccagacccctggactgatgcgggattgctggttcagttgaccggttttgtcatcaaatcgataaattgcaagcatagcgggctccttggctttttcttttagtttacaacaagcaacagcaggatgcaggagggaaacacatgcgtaagcgtgaaacaaaaattcatttggcagcagcacaagcaccgctttttgcttgtccagtctgtggacaaccattacaggtgacagcgggatcgttggtttgtgtcaacggacatgtacgcgatttcagccacaaagggacgctgaacttcctgaatcagcaagtagccaccgaatacacgacgccgatgttagccgcacgacggcgaatgttgaacgctggtttgttcaccccatttttggcagctatggcagccaaacttccgaaacatcaacgactgttagatgtcggctgcggggaaggcacgccgactgcgtatttggccgaggcgggtcaacaaactgccgtgggttttgatatctcatcaccggcgatcaatctagcaggcggcttagcggcaccagttctgtttgcggttgcggatctggcccacctgcctttcgttaacgatgcatttgataccgtgaccgacatcttttcgccaggtaattatcgtgaattcagacgtgtgctgcgtcctgatggtcagctattgaaaattattccgcgggcgggttatcttcgagaaatccgggaaggcttatactccgggacggctaaggctgtgtataacaatgagcctgtcttgaaaaggttcttagcagctttccctgatgcgagtcaggagacaatcacctacgattttccgttagcgccaactcaatttggcgatttaatggccatgaccccgttaacgtggcaggcgcccgccgatcaacgcgaccaaatgcttgctgcaccgccgattagtatccatattgatgttgatttgctcactgtgtcgcatcttgtcaagtaaaagggttgtaaacatcgatggctggtgttaatattcctttaagctatttatttttaacttttatcagggctagcttttgggtaattgataaaagtttgcgataaattacttcactaacgtatcgcttcgatgagtgcgctccgaagcaatgcgtttttttcttgcttatttttacaaattgacctgtccacaaggcctgttcgtgcaagttaaatgtgctaaacttaaaccacttgcgttgaagggaagataacatggcgaatcatattgttttatttgaaccgctgattccggcaaataccgggaacattgccagaacctgtgcagcaacgaatagctatttgcatctcatcaagccactgggatttgagacagatgataagcatctgcgtcgtgcaggtctggattattggcaacgcgtccggatcatctatcatgatagtctggatgacttcatggcaaccgttaaggaaccccaacacctttaccttattactaagtttgctgatcagacatactcagaccgagattatgccgacattgatcaggatcattatttcctttttggcaaagagacgacgggactaccggaaggcttcatgcgcgatcatgccgatcagtgcttacgtattcccatgactgacaacgtccgcgcgttgaacttgtcaaattgcgcagcattggtcatttatgaagctttacgccagcagcattttgcaggacttgaaacatcacatacgtacgagcacgacaaattaaagtaacccaacaatagaagtgtgcgagctggctcgagtagaaactggcatgtgaatggctttgaccgttatggaaaaggacgcttacaagaaggtttctcggttggcaagcgcgtttaggaggctgtatttatggaaacaaaacgttaccctatcgcggttgaatcttttcactatgatttggttaagcaaggaacaccggttaagaacgacttgcaagttgccatgcgccagattgaatggtcagatcctgctaaacaagatgagttgaaaaaaggcaatctttttcagatgatgattccatttgacgttgtccctgacgatgccggttttgagatttctggcaaaattacccagattgtgcaggttttggattattttggtgaggcaaatgaattgccgcaagccgaacttggcaaactaagccggccattggttgaaaccattgaaacgttgacttaccaagtgaccgcagttgccttggatcaaggggttaaccttcagtttggtgccagtgatgaacaaccgggccaaacaaaataagacaaagttgagtcatgatgaaaggcggccgttatcagccgcttttttgatgagcgcgaatgcattctgacgacaggcgttgtcttttagctcaatgatcactgaatcatcatggctttttatttgcgagttcagctcgtgtataataggcgggtatgaaaggagcatcacgatggcacagaaacgcagcggacgcaaaagcccgcgcagaaaacgacctaccaaacaacaacagcacacccttagttgggtcggtgcgttatttgtggtgttcgccagcttggcatttttccggttaggcattgtcggaaccgtgtttgctaatgttttccgattggttgttggtgatagctttctagttgtcagtgcagggatgatcctgatggggatttggtttctcttcgcagatcgattgccgaaattggcacggcatgtgtgggttggcctcgcaattatcttaatttgtgccttggtactgttaagcgcaggcaccatgaccacattgaatgtgcacagtcattatttgttggcgacctggcgcctacttcaaaatgatttcggcttaatgacgacggcctctagtgttggcgggggattgatcggggcgggtttgtatgcgttacttgcccctttactaagcagcatcggtgcaacgattcttgcatggctaggcatcgttgttggcacattagcttttctaggtgtgggtgcgaatcaggtttttaattggttgcagcggtgtgggcaagcttgtaaacatggcgtgatgcaggtacaagcagccgtggcggctatgaaaaaagaacgcgtgcaaaaagcggctgcccagcagaaaaaaaccgtttctgcgaagccacagacaactacgccggttaccgaaaacgaagcacccagtgaaacacctgatcaccaggatgatttcacgattaacgggccggcaccggttcacgaatcgacgcaaccggttcccttgccacgcacagaacctaagccgcagtcagctacgactgcgccacaacctgagactagtgaagcggcatctggacttgatgcagacgatccttccacgaattatcagttgcctgatcttgacatgctgacaacgattccgccagttgatcaaagtgctgaatacaaggcgatcaaaacaaatcgggttaaactaaaagaaacctttgaaagttttggggttcatgttgcggttaaaagtgccacacttggaccatcgattacccaatacgagattcagccagcggtcggcgttaaggtttcaaagattgtcaatctttcggacgatctggccttagctttggcagcaaaggatatccgaatcgaagcaccgattcctggtaaatcattgattgggattgaagtgccaaatcaacacattgcaacggtcggcttcaaacaagtcatggcagaaacgccgaagtcgcctgatcgcccattagtcttaccattgggtcgcgatgtgaacggcaaagtcgtgacttttgatttgacaaaaatgccgcacttgctgattgccggcgccaccggttctggtaaatcagtcatgatcaacgtcattttaactagcattttaatgcgaacgaagccaagtgatgttcgcttaatgttgatagatcctaaacgggttgaattgtcggtatacaacggcgtgccgcatctattaacgccggttgtgacagaagctaaacgggcgccaagtgcgctgaacaagattttaacggccatggatgagcggtatcaacgttttgctgcggctggcgtgcggaatatgaccgaatttaatcaaaaggtggcggctgatccgacaagcggccaacaaaagatgccgtatattgtcgtgatcatagatgagttgagtgatttgatgatggtggcaggtaacgaaattgaaactgccatcgtccgcttggctcaaatggcacgagcggctggtattcacgtcatcattgcgacacaacggccgtctgtggatgtcatcactgggctaatgaaagcgaatattccctcgcggattgcttttgcaacgtctagtggcatcgattcacgaactattttagacagtaacggtgccgaaaaacttctaggtcgcggcgacatgctcttttcaccaattggggcatctaaaccgatgcgaattcaaggcgccttcataccatctgtggacgttgagcgagttgttaaggcaattactgaccaagtttcacctgcatatgtggagagcatgacgccaacggaaaatacggaggctgagaaacccggtgattcagaggatgagctatatgatgatgcgaaggcgtttgtcatttcacagcagagtgcctcgacgtcaatgctgcaaagacgcttccgaattggttacaatcgagcggcgcgcttgattgatgatcttgaagccaatcaaattgttgggccaagtgaaggcagcaaaccgcgcaaagtctttgtgacgccagaacaagtaacgaatggtacgccatcataaggagttttatgcgaaaagaaatgaaaccgggtgtttggttgattgtcttgccgacaacgcaatttaaaaccacccgcatcaatgtgcaatttttagcaccgttgcaacgggcaacagtgactaaacgaacattattaacaagcctgttagaaacgaatagcgctgtctatccgacgcaagcagctttgtcagcgcatctcgagtcgctctatggcgctaatttcagtattggcgtggcccgtgaaggcaagttgcatcgaattggcgtgacgatgagtaccgtggatgatcggtttaccgatacgcctttattgcctcaagcagcggccttcttacgcaccatcttgtttgaacccaacatgcaggcgggtcgttttgacgaagccacttttgcgcgggaaaaggagaatttggatcattatttagccagtctagatgatgatcgccaaacccaagcggcgctgggagtgcagcaactatattttggagccgatcaggatcaggctattccgagttttgggacgcgggaagatcttgcatcgctgacggcgtccagtttggctgcttactatcaagaaatgatgcagcatgatcaggtcgtcatcacggtgttaggggatgttgatcctaagcaagtggcagcattatttgctgattggccacttgatgctcggtcacaaaccgtaccagcagtggcgtttgatttgccgacgcatccagatgtgctgacccaaacaaccaaggtgaaggcgcaacaggccaagtttgatttggcttatcatgttgaaactgatttgatgggacccaaatatgcagcaacattagtggcagaggaattatttggcggctcgagcttgtcacttctattcaccaatgtccgcgagaaggctagtttggcttattatgcgagctccatgttcgatgattttcgcggcttgatgctggttcaaaccgggattgaaggaaaagatcgtcagcaagttgctgatcttattcgtgatcagttggcggcagtggtcaatggcgatttttctgacgccctattgaaggccgtgaaggacggcattttggatcatcagcgtgccgcctatgacagcccacggtttttgacaaatcaggcgttgtatcagttgttagtaccagatgcgccacagaattttgatgagtttgctcagcggattaaggcggttgatcgccaagcggttcaacaggccgccgcagatatgaaattgcaggccacctatttcttgactggggaggatagcgaatgaagacacagtattttagtgatgtcgatgaaacggtgatcacgaccacgctatcgaacgggctgcgattgcaagttgtgcctcgccccgcgtatcacaaaagctatgcgatcatgacaaccgattatggttcgattgatacgcaatttgcaccaaatggcaaacagatggtgacttatccggccggaattgcccactttcttgagcacaagctatttgaaaaggaagatcatgatgcctttgatctttttggtgaaactggggcatcagcaaatgcattcacgagtgcgaccaaaacgagttttttattctctacaacaacgcagctgacgaagaacttacagattttactggattttgtgcaaacgccatttttttctaaggcatcagttgctaaggagcaaggcattatcgggtcagaaattcaaatgtatcaggatgatccagggtggcgcggttatgccggtttgttagaaaacctttttccaaaccatccggcgcatgttgatgtggctggcacagtggcaagtattgcccaaatcacgccggaaatgttgtatacgattcatcgggttttctatcaaccaagcaacatgacattgattgttgtgggaaatattgacgctgatgccattatggcttttgttgcggctaatcaagcagccaaacagtttccggcgccacaggcgattgtgcgtggcgttcacgcggatttgcagacggatgatatcgtgccatatcgccagttggagatgccaattagtcgcccaaagacgctggtcggcatcaaagggcaggttgcgattcctacaacggctgagggctggcggtaccaattaaccattcggctcttgttagaagttctgtttggcgattcttcccagttatatcaagattggtatgaccgaggattgattgatgactcatttgattttgattttacgaaccagcgcagctttagttatggcttggtcggtggtgataccgatgatccgcacgcattaagtgatgcgatcaaacatgtgttgctaaacgcagcgacacagccggatttgacccgcgaccgggttgctctaattaagcgggcgtcactgggtaaatactacgctggccttaacggactgaatggtgtggccaatcagctaagtgcgttgagttttggccaggcgagtttgtttgatttccccgagattttgagcagcatcacgctagcggatttacaagctatgattgatcaggtttttcaggcgaaagcattgaccgttttagatatgattccggaggcagattgatgcgagcagctttgattgttggtgcgtcgggtgacattggccaagcggtggctaaaaagttggcccacgatggctggtcattgtacctgcactattttgaacacgaacaagtggttaccagccaaattgcgacttttcaagcggcgtatccgaatcaggattttattccgttacagtatgatttaactgatgatcgtcatttggatgatttgacggcccagctttttagcttggacgcggtcatttttgcggcagggatgacgtattatcatttatttaaagatacaaccgtttctgaattaacaactttgatgcgcgtgcatctattgacgccgatggctcttttaacgaagatcgagcacaaattagcacagtccggtcatggccgcgttgtctttatcgggtctgtctatggtggcgcaggttcagcgatggaagtggcctatagtactgtcaaaggcgcgcaaagtgcctttgcaaaagcctatgctcaggaagtggccagtctgggcatcacggtcaatgtggtcgcgccaggtgcagtgacaacaaaaatgaacactaaaatgtttgatcaagcgaccttgaccaaggttcgagaggaaattcctgctgcacgatttgcgactccacaagatattagttactatgtgactatgctagttgcaaaagatgctgcttatctaacaggacaaactttatatgttacaggtggctggcgaatctaggaaacaaaggatttcttaaggcttgcagttggtttttcatgatatactgaaaatggtcaataaaaaatagcgggtgaataaaacttatggatgaaattgggcaaaaattacgggacgcccggattcaaaaaggctatacgattgatgatcttcaacagatcaccaagattcaaaaacgctacctgatcgcgatcgaagaaggtaattttgatacgctgccaggcgacttttatgtgcgtgcctttattaaacaatatgctgacactgtcggccttgatggggatgcgttgctgacgcaattccagcaggacatcccggaacctcaaccccaagagtatgcagcacaatcagttgaaaataagactcgggcaacccgcgccgaagaagcgagtccggttaaccgtttgcggcgttatttaccgcaaattgcgattgctgcaattgttgtcgtggcagtcattgtgatctatgtcatcatgttggtttaccaatcaggacccaagcaaacgatcccgacagattcagaaagtgttgcggtctcatcgaagcgtagtacatccaagacttcgaaatcgtcgacatcttcgaaaacaagcaagacatcagcggcttctagttcttcgaagactgcggagaagtcgtccaagaagagtactaaaaagagttcgaaattggacatttctgtagcggatgccaatggtgctactcaggcagttactttaaagaatctgccgaagacgggtaacaagttaacgcttggtgcaaccggcgccactgcttggatttcagtaattgtgaacggctcaacgacgtggcaaggttcattgacatcaggtaattcgcaagaagtgacattgccagacaacgtcacgacattccaagtgcggtcaggcaatgcaactgcgaccaccatcaagctcaatggtcagagtgttgatatctcaaagggaaccagcatcgtacggaccatcaccttcacggctgatgcaacagaaagcgagggttcgcaagaatgaatcttccgaataaattaacgctcatccgaatttttctgattcctgttttcacgatcctgctggcacttgattggccggctgggtatctgacacttgcaggaactaaggtcgccttgagctggtttatcgcgctgattatttttattgtggcctctttaaccgactttgctgacggtcaaattgcccgacgcaagcatttggtcactaatttcggtaaatttgccgatccactggctgacaaactgctggttatgactgccttcatctttctgacggccaatggtcagattccagcatggggaaccgcgattatcctgtggcgtgaattagccgtaaccggattacgcttattgctttcaaacgaaggtgaagtcttagcagcggcttggccgggaaaaatcaaaacaaacgcgcaaatgtttgccattattttcttgatgctaaacaacgcatggtttaacaatatcaatgtgccgtttgcactgatcctgttctatgtcgccgttttcttcacgatttactcaggtgtcgaatacttctacaaaaaccgtggtgtgttcaaggactcattcggttcaagtcatcaataataagttattccaatacccaggcaggtgcttgggtatttttgtagagcgcgagcaggagcgattagaaaccggagtgtaagtggccttgaacgtaggtttctgcgactgcgagcgcgtttgcgagcgcagcgtgaagtcgccactaacctaagctgggtggggaacccccaccagcaaatacggagatccctatgtgcaagcttttggaccagcaggcccggttgcgagcaaagcatgaatcagccaacaaaaaatgcacgcttaccttagtgaagaagtatctaagcaccatacagctatttagttgcaactttttttaaaaatgtcaggtcaagtaccttaaaaaacgaattctattgttaggtgggaaaagtatgcaagcagagattattgctgtcgggacagagatcctgatgggacagattactaacacaaatggtgcctatatggctaagcaactgacagcactgggtattgatagctaccatcaacaggtggtgggagacaacgggccgcgacttgaggaggccattaagttggcggaaagtcgcagtaatttagttattttgattggcgggttaggaccgacaccagatgatctgaccaagcaaacattggcagcgcacttgaaccgcaaattggttgaagatcctgacgctatggctaaattacaggcgcgcgtcaagcaacagcagcggccaatgacgcctaataatcaattacaggccatgtatccggaaggcgccgatattttggtcaatcgggttggcttagcggttggcgcgtggatcgtcaatgggcagcacacctatgtcttattgccgggaccaccgaaggaattcgttccgatggttgatcatgaactgctgccgcggctagcaaaatggagcggccacgcggaaattatggtcagccgggtcttacgtttctttggcattggcgaatcgcaactagtgacagatctggacgacttgattgccaaccaaaccgatccgaccattgcaacttatatcaaggatcatgaggtgacggtgcgcgtcactgccagtggcgctaccgaaaaagacgctgatgcaaagttagaaccaatgatcggtgccatcatggatcgtgatggtcaatatttttacggctacggtgacgacaatagtttggcaaaagaggttgtgaagacgcttgcggcaaatgatatgcaaattactgcagctgagagtttgactgctggcgcatttcaagcagcgttaggcgatgtgccgggggtatccacttattttaagggcggttttgtcacttactcacttgcaacaaaggccgcttttttggcaattgatgctcgcgaattagcggcacacggagttgtcagcgcatttacagccaaggcgatggctgaacatgctcggcgtaaggcagcggcggatataagtgtcagctttaccggcgttgccggtccagacacgctggaaggacagcctgctggtacggtttggatcggtttagcgcggcgcggccaactgcctgaagcacatgtttaccattttcctggcggtcgcaatgatgttcggcagcgtgctgtgatgactggtatgatgcttgcattaagggcgctgcaggcctaacagaatcattctttaacacgttaatacgtcaggtttacgcaagaggaggcggcaagatggcaggagacgaacgccagaaagcattggatgttgcactgaaaaagattgaaaaaaattttggtaaaggcgcgattatgcgaatgggtgctaaggcggacacgcgcgtttccgttgtctctagcggctcacttgccgttgatgatgcacttggtgttgggggctttccgcgcggacgaattgtcgaaatttatggaccggaaagttccggcaaaacaaccgtcgcgctgcatgctgttgctgaagtgcagaagcaaggcggtactgccgcctatattgatgccgagaatgcgatggatcccaagtacgcaactgctttgggcgtcaatattgacgaattattgctctcccagccagacacaggcgaacaagggctggagattgctgatgaactagtcgcgtctggtgccattgatattgtggtgattgattcagttgctgctttggtgccgcgggctgagattgagggcgatatgggggatgcccatgttggcttgcaagcccgattaatgtcacagacgttacgtaagttatccggttccatcaataagacaaaaacgattgctttattcattaatcagattcgtgagaaagtcgggatcatttttgggagtccggaaacgacaccaggtggtcgtgcattgaagttttatgcgactgttcggttagaaatccggcggtcggaacagatcaagacaggcgcagatgtcgtcggcaatcgcactaaaatcaaagtggtcaagaataaggtggcaccgccttttcgaacagcaattgtggatatcatgtatggccaaggcatttcgcaaactggcgaacttgtcgacatggccgttgagagagatattgttgaaaaagcagggtcatggtacgcgtatcaaggtgaacgcatcggccaaggtcgcgaaaacgctaagacatatcttgataaccacgctgatcttcagcagacgattaaacaacaggttcgcgtggcttatggtatggcagccgcacctggtcgggagacggcttcggtcagtgaagatcaacccgaaatacatcaacaggctgaagtatgaatcatgagtcatgagtcaacttgctgttgtcggatgtgatgagtccgatggcgcaagtttttttatctgagcggtcttaaggagatttgatatatgttttatttttctcagttcgtaaaaagcatcacccagacttaagactgctttaatgctggtttttaggcgccgctgtgcgcctcccgcttcggttgacaccttgcaccctagcacgtaaactaatagaggtgtaataatttaaaaaagcatcaaagattttgatcaaaatttgattgaatcgcttagatgatgcggaggtgaaatgatgagttcagtaacactggtctcaataaccctcgcagcagtcatcgctttagcggtcggtttattgatcggatttgcacttcaaaagaagctccaccagaacaatttggatcgagcgacgcagacagcagaaggcattattgaggccgctaaaaaagaagcagcgactttaaaaaaagaaaaactgctggaagcaaaagacgagaatcatcgctatcgaacccaacttgaagatgaattgaaagatcggcggacagaagtccagaagtcggaacatcgactgaatcagcgagaggatactttggatcggcgggacgatacgctagatcgcaaggaacaaagtcttgctgaccgggaagcaaatttgaacaagcggcagcaacagctagatgaacgtgaacaagatatctcttcagaaatcagtaaacagcacacagaacttgaacggatcgccgagttgactcatgaacaggctcggcagcagattcttgaccagacacaatcagaactgacgcatgaacgcgccgtgatgatcaaagaaagcgaagatgaagctaaggaagccgcggataagaaagctaaagtgttgatcgccgatgcgattcagcgcagcgcttctgacatcgttgccgaaacgacagtgaccgtggtgaacttgccaaatgacgacatgaaaggccgaatcatcggccgtgaaggtcgaaatattcggacacttgagactttgacaggtatcgatttgattattgatgataccccacaagccgttgttttgagcggctttgacccaattcgccgggaaatcgcgcgaattgctttggaaaaactcattcaagatggtcggatccatccagcacgaattgaggaaatggttgataaggcgcgcaaagaaatggacgaccggattcgtgaaattggtgaacaagccattttcgacgtcggtatccataatatgcatcccgatctgattaagattttgggccgattgcacttccgtacgagttacggtcagaacgttctggatcattcgattcaggtcgccaaactgactggtgtgatggctgctgaattaggagaagatgtcaccttagcgaaacgcgcggggttattacatgatataggcaaggcgcttgaccatgaagttgacggatctcacgttgaaatcggggttgagctggcaacgaagtacaaggaaccaaagacggtcatcaacgccattgcatcgcatcatggtgacgttgaaccaaccagtgtcatttcggtactggttgccgcagcagatgcgatttcagctgcccgcccaggcgcgcggtcggaatcgcttgagaactatcttcatcgtttggagaaactagaagcaatcgccaacagtcatgctggcgtggatcatagtttcgctattcaagcaggtcgagaagtccgggtcatcgtccaaccggaaaagctctctgatgatcagagcgtcatcttggctcgtgatattcgcaatgaaattgaaaaagaactggagtatccaggccatatcaaagtcaccgtgattcgggagacaaggactgtggaatacgccaagtaaaaaacacagtacccaccagcacaaagttggtgggtactgtattttttatgctgttttagttcggacattattgttagacagttagatgtcctcttagagcttaggctttcttggtaaagggacttcgcggtattgactggcgccaatggtaggcgaaaactgtccattcaagaaatcatttagggccgcgagcgtcgcctgcaaatgctcatcatctagatacagggtgatggtaacagcagtcccgtaatcagtgttcgcaattgacaaatgattggttgtcaaaaaatgctgaattggatcaaagtcagcgtaaggaatggtaaaagttacagctttttgtttgatgcgcgccacaatgccgatggtttcgatcgccgtgttggcattgcctgcatacgcccggatgagtccgccagcaccaagtttaatgccgccaaagtaacgagtcgtgacggctaccacatcacgcaagtcatgctgcaacaaagcctccagtgttggggtaccggcagttccagaaggctcgccattatcgcttgcgcgttgaatttgattggtatcgccaagaacataagcaaaaacattgtgggtagctttggcgttttcctttgatacttgcgcaatgacggccttggcatcgtcttcatccttgatacgcgcaagatgggtgatgaaacgcgattttttaatggtatttgtgtagttgccggtttgttggatggtaagatattgctctgacatgcgtaatctccttatgaggtgatcatgataaatcttgctggggcacaattgacagaaaatgaactgatgcgcttaaccgtttctaatatagcacaggccacatcactgccagcgttgattcaagaacacgggcgctggtgttgccaacgttgcggtgatcgaaagccagttcaattgcctgatgggcggttttattgttcagcttgcgtgagtttaggccgcttaacaaatcgtgatttgctttaccgctttgaacagccgcaccggcctgttggcgacggcttattaacgtggcacgggacattgacgcctgcccagcaaaaagcgtcaacagctttacaaacgagtgttacagcaggggctgatcatttgatttgggcagtgacaggtgctggcaaaaccgagatgctttttccgaccatttcacagatggtacaacaaggcaagcgcgtggctattgtttcgccgagaattgatgttattcgggagcttgcgccgcgactgcgaactgcctttgcaaccacccccatcgccgttcgatatggcggtcattttgatcaaactgacagtgatttgttgctggccaccgtgcatcaattattacgatttcatcgggcttttgatctgattgtcgttgatgaggtcgatgcgtttccgatggcgggaacacccatgctccatcgggctgttcaaggtgcccggcgtggaccggttgtttatttaacggcaacgccggatcggccattgaaggcggcgatgcgtaaagggttgatggtcagtcgattgtttcgtcgatttcacgggcaccctttgccagttccagcgattcggttgatgaattttaaaaaattaccgtcccagttgccacctgccatcgtgaagtgggtgcgtgatgtcgtggcgacagggcggtcatgtttgctgtttgttcctaagatcagctgggcgcctcaaattgctgcgcttgttcaacgtaacgggctaagggtagctggcgttgctagcacggaccgtctacgggcagagaaaataacggcttttcgtcagcggcaaattcaggttttagtcacgacgacaattttggaacgcggcgtaacggtgcccaagtgtgcggttggggtcgtggctgcagccgatcgggcattcacggcctcggcgctagtacagatcgctggtcgagccgggcgggcagccgatagtgccgacgatccggttgtctttttcacggatcgctatacgttagcattgttagcggccaaacgtcagattgtcatgatgaatggacggtgatggtgatgcgttgttgcgggtgtgatcgccatgttgatcgtagtccgacgttgaaggcgttgttagctggcagcaagttgatagcaccccgattgtgcagtagttgtttagcccgctttaagatgattactggagcgacttgtccaggctgcggccggtcgggtgatgcacgaatatgcgcggattgccgccaatgggagcagcaagggcggttgttacataatcgggctttatttgtttatgacgcagctatgaaacaatggatttaccagtacaagggtcttggcgattatcgcttacacgatgcgtttcaagatctcattgctgcacaattgcaaaatgctaggacactgatcgccattcctagcgaatccaaacattatgatgtgcggggatttgatccaattcagggactttttggcggtttgcagctgcagccatggctacgtaaatcaccaacggccaaaccgcaggcgcagaaaaatcgtcgcgaacgattacaaacgccgcaaagctttaccgtacttgtgccagcagcaaagttgaatcaaaccaaacaaattacattggttgacgatttatataccacaggacggacattgtatcatgctcgcgatgcgcttgtggccgcgggatttcagggcacggtgaccgcatttactttaattcgctgaaatgtggcttttgttgtgtctggcgacaacattcgggtataatgaaattgaagattggaagggttttatcccaaccaatcgacgtgtaagtgtttattacacgtaggaaaggggagaagttttatgctcacatacaatgttcgtggcgaaaacatcgaagtcaccgaggccatcagaagttacgtggagaagcggattagcaaactgaacaagttcttcggaggttcggttactgcaacggcacacgtcaatttgaaggtttattccgataaaactgcaaaagttgaagtgaccatcccgttgtctttcttgaccctgcgtgctgaagaaaccagcccggatctttatgccagcatcgatctcgtgaccgacaagctggaacggcaggtacgcaagttcaagacaaagatcaatcgcaagtcacgtgaaaaaggctttggccaaatcgacattgatgcgactgcaccagctgaaccgaaaccagccgaagatgatgataatctgacggttgttcgtactaagcgagtgtcgttgaagccgatggattcgcaagaagccattctacagatggatatgttggggcacaacttctttatctttgaagatgctgacaccaatggcacaagcattgtttataagcggcgtgacgggcgttatggcttgatcgaaaccgatgaataagcagttcttaaaacaaaaaacaagatcgccgcaaaaggtgatcttgttttttgttgggaaagtttgccatatggacttattgctggtaagtttttattaaagtttaatgacaatatacaaattggggcctggtatatgaacttgcaggcagtgaagattgaggcgctatcgtgctggtattcagttgttattgtgaacggcatcggcgtgcgctcgtcgatgtggatgatgcaagatctttgtactgctcggttttcaatacccaatgaaaatgttaagatactatagatatactgtcagtttaacgaagtttcgacagagaggaatccattcatggccaatattcttagaaaatgggtcgaaagcgataagcgagaaatcgcgcgcctaggcaaaattgctgataaggttcagcaatatgaagatgagtatgcagcattatctgatgaacaattaaaagcaaacacaccaaaattaaaagatcgtctcgcagctggtgctacccttgatgacattctgccagaagcctttgcgactgcgcgggaaggtgccaagcgtgttttaggtctattcccgttccgagtccaaattattggcgggattgtgttgcatgaaggcaacattgcggagatgaagaccggtgaagggaaaactttaaccgcaaccatgcctgtttatttgaacgcactcactggtaaaggtgttcatgttgtcacggtcaatgagtacctgtcaacccgtgatgccacggaaatgggcgagctatacaactggcttggcttgagcgtagggttaaacctcaattccaagaacagtgatgaaaaacgagaagcttataattgcgacattacctattccacgaacagtgaactcgggtttgactatctgcgtgacaacatggttgtttacaaagagcagatggttcagcggccactgaattttgcaatcgtcgatgaagttgactctattttgattgatgaggcgcgaaccccattgatcatttctggcggcgcagaaaaaacaaccggtctctacattcgtgccgatcggtttgtcaagacgctaaaagcggagaccgattacaagatcgactggccaacgaagacaatctcgttaactgaaagcggcatccggaaggctgaaaagaatttcggactggataatctgtatgacaccgaaaatacggccttaacgcatcatattgatcaggccttgcgggctaattacatcatgctcaaggatatcgattacatggtttccgatggtgaagtcctcattgttgatcagtttactggccgagcaatggaaggtcgccgatattctgacggcttgcatcaggcgattgaagccaaagaaggcgtccaaattcaggacgaaaataagacgatggctaacatcacttatcaaaacttcttccggatgtacacaaagttggccgggatgactgggaccgcaaagaccgagcaagaagaattccgagaaatttataacatggaagtcatctctgttccgaccaacaagccagttatccgggttgactcccctgacgtgctgtacccgacgttagatgctaagttcaacgcggttgttgaagacatcaaagcgcgtcatgaaaaaggccagccgatgctgattgggacggttgcgattgaatcgagtgaacggcttagtaagcaacttgatgaagctaagattccacataccgttttgaacgcgaagaatcactttaaagaagcagaaatcattatgaatgctggccaacgcggcgctgtgacgattgcgacgaacatggctgggcgtggtacggatatcaaacttggacctggtgtcaccgaacttggcggtttggcagttatcgggacggaacgccatgaaagtcgtcgaattgataatcagttgcgaggccgttcagggcgtcaaggcgatccaggttctacacagttttacctgagccttgaagatgatctgatgaaacgctttggttctgatcgaattaaagctatgttggatcgctttaaggtggcggatgatgatcaggtgattcaaagtcggatgatttcacggcaggtggagtcagcccagaaacgggtcgaagggaataactacgacacgcggaagaatacgctgcaatatgatgatgtgatgcgtgaacaacgcgaggtcatttacaagcagcggcagcaagtcatcaatgaacaggaaacgttgaagcctgtcttgatggctatgatcaatcgaacgattacacggattgttcagactcatacccaaggagatcagaaggactggaaccttgatgccttgtacgcttgggtcactgctaacatgattgatcctgagaaattcaaacgcagccagttagatggcaagtcgcaagacgagttgatcgggttactggccgagatggcggagaccaacttccagcaaaagaataagcagctgggcgatgacgcgcagatgcttgaattcgaaaaagttgttgttttgcgcgtggttgattctgcttggaccgatcatattgatgcgatggatcagttgcggcagtcgatcggattgcgcggttatggtcaaatgaatccgctagtcgaatatcaagaagaaggctaccggatgtttgaagaaatgattgcatcaattgatgatgatgtgactcggctgttcatgaaagctgaaatccgacaaaatattcgccgttaataacggcttagcgccccggtaccgcggctacagcttgcggtactggggtgttttgaagcagtcgccgacgcacatggtcacgctacaataacgcaactatgtttaaaaaaagggagattacacgatggaactgagtgttatgcgcaacaccttggccgccatgcggaccaaaattaatcaatttagggggtcactttgacctcgatgcgctgaacgaacgcattactgaaaatgaaggccgaatggctgaacccggcttttgggatgactcggaggctgctcaaaaggttattgacaacaacaatgcgctcaaagaaaagcatgatcgattttatgcactagaaaatgagttggaagatcttgaggctggttttgagttattacaagacgagcctgataaggacttgcagcaagaagaagaagcaaagatcaaagatttacaggaaaagctggataagtatgagatgcagcttttgctgaacggcccatacgatcacaacaatgccattttggaaattcaccctggtgcaggcggcacggaatctcaggattggggatcaatgctgatgcggatgtatcagcgttgggccgatcagaacggattcaaagtagaagtggcggattatcagcctggggatgaagctggcatcaagagcgtaacgctgctgatcaatggcgagaatgcttatggcttgctgaaaagtgaaaaaggcgtccatcgacttgtgcggatttcgccatttgattccgctggacggcgacacactagctttgcctcggtggacgtgatgccggaactcgacaactcaatcgaagttgatctgcggccggaagacatcaaaatggaggttttccgctcaagcggcgctggcggtcagcatatcaacaaaacctccagtgcggttcgcttgattcatctaccaaccggaatcgtcacctcaagtcaggcgcaacggtcacagtttcagaacaaagcgactgcgatggcgatgttaaaggctaaattgtatcagcgcgaagaagaagctaagcgtgctaaggccaaggccattcaaggcgaacaaaaagatgtcgcatttggttcacaaattcgctcttacgtctttcacccatacacgatggtgaaagatcatcggacgaattatgaaaccggcaatggcaatgcggttatggacggggatttgaatccattcatcaatgcgtatctacaatgggaacttgcgcaaaagaatcctgattaaactgtaatctgcctgaaaccttgctgacttaatcgcctgttatactgatgctagcttagaaaaaggagcaatttgcatgattcaaatggagaacgtgacgaagcagtatgctaacggcgtgactgccattaaaaatctcaatcttgagattcatgatggcgagttcgtctatgtgatcggtcccagcggtgccgggaaatcgactttcgtcaaaatgctttaccatgaactaatgccaaccagcggtacgattaaaattgatgattttgattttgcaacaatgaaaccgagccgggtaccatttttgcgacgtcatattggtatcgtctttcaagattttaaacttttaccgcggttaacagtgtacgaaaacattgcttacgcgatgcaagtgatcgaagcacctgacgaaaaaatcaaggaccgagtcctcgaagtactgggcctggtaggtctcgaacaaaaactgcgccgttttcctgatgaattatccggtggggaacaacaacgtgtgtcagttgctcgtgccatcgtcaacaagcctaaggtattgatcgccgacgaaccgacaggcaatttggatccacaaacatcagatgaaattgttgatattcttgagcggatcaatgccagcgggacaactgttattatggcgacgcataacaaggacatcgtaaatgagcgtcagcatcgcttacttgaaattgctggcggccgtttggttcgtgacgaagaaggaggcacttacggtaatgaagactaagatctttttccggcatgtaaaggattcgctgcgcagtctgaagcgaaatggctggatgtcagttgccgctgtcagtgccgttacagttaccttactattggtcggtattttcatggcacttattttcaacttgcatcatgtatcagagcaagttgaaaatgacgttcaagtgcgtgtttacatcgagaagaaaactacgacgaaacaacgtgatgcattaaagactcagctagaaaagcttgataatgtcaagaaagtgacttaccggtcacgtcagcaggaattgaacaccattgtcggcgggtatggttcgcaatggaaaatgttctctggcgatcagaacccattgagtgatgtcttcatggttaagacaagcaaccctaaggcgacgatcaaggtctccaaacaagctcaaaaactaaaccatgtggtggacgcaagttatggcggccggactgcgaaaaaactgttcaactcagttgattcagcacaaaagtggggacttggttttactgtccttctgctgttcgtggcggttttcctgataagtaataccattcggattacgattctgtcgcgttctgacgaaatcagaattatgcgcctggttggggcaacaaattcatacattcgttggccatttattcttgaaggcgcttggactggattgttcggggctgtgctcccaattgtgattgttgacatcggttatgccgttgtttaccgcagcttcagcttatcaagcggctctaacggttattcgctatatggcacgatgccatttctgctttggcttgatttgatgctggcgggcattggtatcatcatcggtgcattaggcgcagtcatttcaatgcggcgtttcctcaaaatttaatcgtgcaatttgtgaactcatcctcgctaatgacggggatgagttttttgctatcatactcggctatgcgtgcctactcacattttgatttttatgacgttgtgggagcctccggcgatttctgctatactggtcacagtgaatattggagggttaccgatggcagttgtagttgccttacttatcaatccggttggtttggtgttttggctagcgctaggtttaacgatttggtttactgtcaatcgcactgatcgcgagcgccgccggtatctgcgcgcaattcatcccaaacatccagaaattggtcggttcttctggatcggacttgtcgtaggtgcgctagtctcgctggtaatggttattggacgactgcagatcagtttagctgctttgcttgcattaagcggcttgacgttagtagcattgctattttctaaatggcgatttagcccttggtggctaggtcttgccagtctggcggcagttggtcagtctggtttgctagctgaacagcatgcagctaatttagctattttggtcggcctattatggctaacacaagctggacttgcgagattcaaccgcggcgatgagatcgagtcgcctgtgattcaacaagaccgccgccagcggcaaagtgcggcgtttgagttgcggcaactgttctgggtgccgttaatcttacctgttgctgttgaaaacgtcagcaacctcccactgctggcggttacagtgcagtctttgacttttgtgggcttgccgttgcttttaggtgcgaccttcatgactccgcgagatcgcgctcagacggcttggcggcgaagttggccgtggtatggcggcgcaggtggcgtgcttatcgtttatggcattgttgcccgcaccatgaccttgcctttgctggttagtcttgtctttccagcagtggtgagtttagtattggttggcggcttcatttggcagggacggcaggtgcatctgacggtgactttagccgatcaaggtgtggtgttgattggtgtcgtgccgcatacaccggctgcagagatgggcttacaacccggtgatcgtgtattggcctgcaatcaccattccgtgaacaattctcgtgagctttacgatgccattcaaaaagaaccaacctattgccgcttgcggcttcgacaggcagatggtgagctgcgattagctgagacggccatttttgccggtgccccacacgaacttggtatgattttatttccggaggagacagcatgaagaagatcttgattgttgatgacgaacctgcgattttgacgttgctgcaatataatttggaagctgaacactatcaggtcgaaacagcgacagatggtcaggaggctttggataaagtacgcaacgagccatttgactttatcatcctcgatttaatgctgccgagtctgagcggcttggatgttacccgcaaaattcgtgaagataaaattcagacgccgattatgatcttgactgccaaagacaatgaaaccgataaaattgttggcctagaactcggagcagatgactatgtgactaagccgttttcgccgcgggagatcattgctcggatcaaggcgattgaacgacggagtcagagtcagccgcaaaccagtcaaaaaccgggcaacagtgatcagatcacagttggccagatcgcgattgatccagaaaattataaggccagcaagggtggcaaacgtctgcagttgacgccaaaagaatttgagctactggtttactttgctcaacgtgttggcaagaccttgtctcgagatgctttattgaacggggtttggggattcgattatcccgcagagacgcgaatggtggatattcaggtcagccatttacgcgataaaattgaaacggatccgaaacatccggactatttaaagacagttcgcggtttcggataccaaatggaggcaccccatgaataaacgaatcattcggcgtgcactcatcattagtctgctatcattggcaggcttttttgtgctcgtgacaacggtgaatcaacaaattgtccatcaacaagcgcgtgatcttcggcgggtcggccggacgtatgcggcctcgagtcatgatggggtcaatcggcaagcattggcagagtcagaggcagccttcatcacggtcattcccaataatccgcggaccacgcgtcaaaaagtgatggctgatgccttgcgtggtaatcgggatgcagcgtttgtaacaaccgtcaacgtgaatggtcgaacagagcaagcgtatttattccaaaataaagggcagtgggtggcagtcagccgctttaagtcaagtgtctggacaactgcaccagagcaattctggctcctaacgcttgcctttgcggcattgctcgctgccattctcatttggctttttcgatctgaacatcgttatcaagaagcgattgaagtcatgagccataatctagatcgcatccgtcgaaagaaagacccagatccggtgattttaccgcctgattcaccttttgtaccagttgctcgccgcatcaatgcattggccgctgaacaagcccatctccgtgaaaaagtggcggtgcgtcaatcaagttttgatcggttgattgataacttgccattgggagtcatgctgattgacaccgataaagatgtcatcttgcataatcacgccatgtcgcagctgctaggtcatcaaatcccgcagccccgacacagctaccttgatgatgttaaaacttatgccttggcgcgcatgatcgaacacacttttcgccatgaaaaaacgcatcatcaggaactgacaattttgaccacgcaaaaatccgttgatgcttcggttattcctttgaatcaaggcatcagtcggttgcaggtgctggtgattctatatgatgtcacttacttgcgacaggttgaaaaaatgcaactggactttgtcgggaatgtcagccatgaattgaagaccccagtcacagctatttctggatttgcagagactttgcttggcggtgcgaagaatgatccggcgaccttggacaggttcttagggattatttatgacgagagcaagcgattaacacaattaattaatgacattttgaccttgagtcgaccggattccaaccaaaatgtggctgcatcggttgctttgaaaaaattggtcgatgatgcattgcataatttggccaaagtgattcaagacaagcaaattcgcgttgaagtggcaattaccccggatctattggtcgtgactgacgagcgcaaattgacccaaatcgtgcgcaacttattgaacaacgcagtcttctacaatcgcttggctggtcatgtcacgatcagcgcccaggttgtcgatcatcagctgtcactggcagttgccgacactgggatcgggatttctgagacggaacaggcccggatcttcgaacgcttttaccgagtagataaggctcgcagtcgtcacaatggcggtaccggtctcggtttagcgattgtggccgaactggttaagagtatggatggtcatgttgcggttcacagccaagtaggggttgggtcaacgtttacggtcactttgcctgtgggtgagggcccgcacagaggatgaaaaactgcagccatcatgcctttacacaatctttacattcaatgacatgaacatttacatgtaactgataaaataattggagcttgaaatggaggatttcgtgtgaaaaaaattgtgaccctgttgagcctgctgtttttgccactgttaatcagtgcttgcaacagcagcagtcaacagtcgggagaatcgatcaccgcagttggatcaagtgccttacagcccttggttgaagcggcgggtgaacaatatcagacggaacatttgggggtctttatcaacgtccaaggcggcgggagtggcacaggtttaagccagatccaacaaggtgctgtggacattggtaattcggatctttttgctgaagaaaaagctggtatcaaggccaaagcattggttgatcataaggtagcagttgtcgggatcgccccgattgtgaatccgaaggttggcgttaaaaacgtctcgatggcacagctgcaaaaaatctttcttggtgaaattaccaactggcagcagttgggcggcaaaaatgtgccgattgttctagtcaatcgagcgcaaggctcaggcacacgcgcgacttttgaaaaatgggtgatgcaaggcaaacagccaatggccgctcaggagcaggattctaccgggatggttcgacaaattgtcggcagtacgccaggtgccatttcttatgtggcgttttcgtacattgataaaacagttcaggggctctcagttgatggcgtcgcacccacggatgcaaatgtcacgaccaatcaatggcgcatttggtcgtacgaacatatgtatacgaaagggcagccaaaaggactcactaagaaatttttggcttatgtgatgtcaccagctattcagaagaagcttgttttgaaaatgggttacgtcccgatgacacaaatgaaagtggttcgggacgcgaatggcaaagtgagcaagcagtaacctgtgatgttatcaagacacggtcagatccgttggctgtgtcaggtgtcggacagaagcgtgatctaatccggatagaaaccgatgttgtggtcttcgccgggaaggttttagttagaaagcgcgtttaggaggtcaagatggatccaattcgggaagcaatgctcaaaaaatcgcgttcagctaagttagagcagcgtggtaaactgatcagtttgctttgtatcagtttaattgtgattgtggtggtggcaattttcttctttgtggcatcgaaaggactagctaccttctttcaaaacaagattaatctttggtcgtttctaagcaaaagtgtttggaatccgtcaatcaaagatgcgcacggcaatcccgaagttggcgccttgccaatgatcgtcggttcgtttggtgtgacattcctgtcagcaattattgcgacgccgtttgcggttggcgcaggcatttttatgactgagatttcccgtaaatggggacagaagattttgcaaccggtgattgaattgctggttgggattccatcggttgtttatgggttcatcggtctctccgtcatcgtgccttttattcgccacatttttggtggtactgggttcgggattttagctggtacttttgttttgttcgtcatgattttacccactgtgacatccatgaccgtggacgcgttaaaagctgttccacgacattatcgtgaagcgtcattagcattaggtgcaacacgctggcaaaccacgtatcgcgtggttctacgtgctgcgattccgggaattctgactgggattgtgtttgggatggcacgtgcctttggtgaagcactggcggttcagatggtgattgggaacgcagcgcttttaccgaaaaatttggtttctccagcttcgacactgacctctgtcttgacgagtggtattggcaacacagttatggggtcgctagataacaatgctttgtggtctctggcattgttgctgctcctcatgtcgctagcctttaatctgctgattcgctggatcgggaagaaaggggagttgaacaaatgaatccaaaagttgctgataaaatcgcaacgacggttttgtatatcgtctcaggtatcatcattatcatcttggctagccttcttggatacattctatttcaaggcttacctcacatctcctggcattttctgacaagtccggctcaaagctttgaggctggcggcgggatcggtatccagttgtttaactccttttatctcctgctgctcgcaatgttgatttccacgccaatttcattgggtgcagggatttacttgagcgaatatgctaagaaaaactggctgaccgatgtcattcggacgtccatcgaaatcttaagctcgctaccttccgtggtggttggtttattcggcttcttgattttcgtgttgcagttcaagtttggcttttcaattttatccggtgccttggcgctgacggttttcaacctgccgttgttaacgcgtaacgtggaagactcgttgcgtggagttgagtatgagcagcgcgaagccggtctggcgcttggcttgtcacgttgggaaactgtcctgcatgttgtcattcctgaagcattgccagctatcattactgggatgattctcggcgcagggcgtgtcttcggtgaagctgcggccctgatttatacagctggacaaagtgcgccagcgttggattttaccgactggaatcctgctaacatcgcaagtccgcttaatcctttccgtccggccgaaacattagccgtgcatatttggaagatcaactcggaaggcattcagccagatgccgttgccgtctcggccggtgcaagtgcggtcttggttctagctgttctgctgtttaatctcggtgcgcgctactttggcaatcgcctgttcaaaaaaatgaccgcatcctaatgtgaatacgcacatgccattgcagtgaagttggtgatggtggtcataaagttggcgacaaaacgcttggaggctcacgatgcaagaactcgaaaaatattcattagatgacacttatattcgtccattcgatcgcgacaagcaggaaattgcgatcgaaacagagaatctacgcgttttttatggtgagaatgaagccattcataatgtctctttaccgtttgagcggtataagattacggcattaatcggcgccagcggttcagggaagtcgacttacttgcgctcgttgaatcgcatgaatgataatattgaaggtgcacgtgtcaccggcaagatcatgtatcgcaaccttgatatcaatagtgacgcggtggatgtctacgaaatgcgtaagcatattggtatggtctttcagcggcctaatccatttgccaaatctatttacgacaacattgcctttgccttacgtcgatttggattaaaagacaagcaaaaactcgacgagatagttgaaaccagtttgaagcaggcggcgctttgggaccaagtcaaagatgacttgaatcaaagtggcatgtcactttcaggggggcaggcgcagcgtttgtgtattgcccgcgcgattgcgatgaagcctgatattttgctgttagacgaaccagccagtgcgctggatccgatctcaacttcggcggttgaggataccttgatgtcattgaaggataagtatacgattatcatcgtcacacacaacatgcagcaggccgcccgaatcagtgattacacggcgttcttctacagcggaacggcgatcgaatatgacgaaacccgcaaaatctttacccggcctaagatcaaagcgacgaacgactatgtctccggacatttcggctaggaggaacacatggctgaagcaaaaaaaatcattaccagttcaaatgttcatcttttttatggcaaatttgaggctttaaaaggcatcgacctagacttcaatcagaatgaaattacggcgttaattgggccatctggctgtggtaagtcaacgtatttgcgaaccctgaatcggatgaatgatctcattccgggtgtcaccatcactggcaatgtcagtttgcggggcaataacatttattcgcccaatgaagatgtcgttcaattgcgaaaacaagtcggcatggtttttcaacaacctaatccatttcctttttcgatttatgaaaatgtcatctatggtttgcggctggcaggcattaaggataaagccgttttagatgaagccgttgaaaccagtttgaagcaggcagcaatttgggacgaggttaaggatcacttgcatgaaagtgccttatcattgtcaggtggtcagcagcagcgggtctgcatcgctcgggtgttggccgttaaaccggatgtgattttgttagacgaaccaacaagcgcgcttgatccgatttcgagcacgcagatcgaaaatatgctgctggaattgcgtgatcagtatacgattattctggtaactcacagtatgcaccaggcctcgcggatttcagataaaacggctttcttcttgacgggtaatctgattgaatttgctgacacaaaacaaatgtttttaaatccaaaggaaaaggaaaccgaagattacattactggacgcttcggataggaggggtagtatgcgacgactttttgttgatgaattgaacgatcttcatgtgcgcttttcggaaatggggatgatggtcaacgaggccatctataagtccgtgaaagcattcatcaatcacgacaaggccctggcccgcgaagtgattcatgaagataagcatatcaatgaacgtgaagtagatttggaaaaacgcagcttcgaattgattgcactgcagcagccggttacgactgatttgcgggtgattgtgacggtcatgaaggccagctctgatttggaacggatgggtgatcatgcggtatcaattgctaaatctaccattcgggtcaagggtgagacccgggttcctcaaatcgaggaagatatcgctggcatggctgaagcggttaaagagatggtagaacaggttctggatgcgtatgtgaaggaagattctgctcgcgcccgcaagattgcgcttgaagaccatgggatcaatgacttttcatcacgaatctacaaggaatgtattcggcagatgcaggataatccagaaacggtgatcggatccatggattacatgctggtttcttcctatcttgaacgaattggcgattatgtcaccaatatctgtgaatggattgtttatctcaaaacagggaagattactgaattgaactcaaacgctattgaggataagttctgagaaaatgacgctcttgctggcttgcaagggtgactgaaaaagattgacattgattgttattttgaaagagggatgatttttacttttgtgaaaatcatccctcttttgatctctcatggatgacttactaatatctaaagatcccggtgccaaggcggagcaatcataggctagatggggttcagccgtgcaaacatcatcagctcagcgttgccagccccatctggctggtgactgtggatagattcctttttgatgaacgcgctgatgatgtgtctcatgtcaataaccagatgaatagatgcattactttcaagcgtccgtcttccgacccgttcaaaaatcaacctttggacctatgcgccccggcgcgaatccgtgcatactaatcatgtaatcaaatcctggagggataacccatgaatgaacgcgaaagaattttagacctagttaaaaaaggcgttatttcaagcgaagaggcgctggtacttttggaaaacctggcgaaacgtcaaggttcccagcaggccgctagcccggccgataacacagctcccgaagaaacttcggaaacgccgaatacggatgatgagcatgcaaccagtgacacggatcgcaatgaagcgctgacagaactcaacactgagattgctgaagcagcaggtgccttagatgctgctaccgcacaggttacaactattggtaaacaaatcgatgcgaacaacgaacagatcatcgtgctggacacgatggaagatctcgaagccctttccccggaaaaataccaaaagcgcggggatttgaaacaggagaatcagaaactgactgatcagttggccgaactaaaaggccaaattgagtctctgaaagcgaaccttgccggcttacgtcaccaaaagcatgatttagagcgtaagaagcttggcgacaagattttaaatgacgattggcaaaaagatgctcgcgatgctttttctgagtttggcaaaaacttaggtgatgcaaccacgcaactgggtgggttcgtgaaggatactgtcaacaatgttttggataacgttgactggaagaatgtcaccattacagtacccggtttagcaactgaaaaatttgaccatgttttcgattttccagatagtcaggcaacgattcttgatgtgaaagttgctaatggtgacgtgaagttcaagacttgggatcagccaggcattcaagttgctgctgcgatcaagttgtacggcaaaatggatgccgcatcgccgctggatgcgttcaaagaccggagccgcattgatgtcacggacgatcattttagcttccaagtaccaaacaagcgggttcaagctgatttggtcatctcattgccaaagcgcagttatgatcatgttgctgtccggttattaaatggcagtgcagacttaactggcattaccggtaaagatttctatgttaagagtacaaatggtcagatgaacttcactcatgttgatggtgtcatgatcgagagtgaaggtgtcaacggctcaatcaaggttcaaggtggtcatacccatgacttgttgctcacaacagtgaatggcgatgtcagtgttgatgccgatccggcaacggccgccttaaagacagttaacgggactgtgcgagctacctatcacacggacttcacgacgcttgaaggcacttcgatgaacggcaatgttaaagtcgccgtgccgtcctccattgcgcttaacggcgaggttcggacgcattttggcagcatcaagagccgcttgagtgaggttgccgaaccagctaaggggattaagcgtctggaactgacgcgtcccgggactggcagtagtgaaatgaaactcaatacaaccagtggtaacattcaattaaaagattcaaatgactgaggggattgcttatgccttttctattaattccattaatgttctttatcattggcttgatcatcgtggcggtttttgccatcgggatattcctgttgaaacttctcattgtaccggccttactcatcatcttagctgtgtggctcttctcgcggcacgatcggtctgaccgttatgatcgtcggcgtccgcgtcacccttatcgtgatcgcgactcatctcggccccgaaaaaatgcaacgcatgtgaccgagtcgcatgacgatgactggagcgatttctaatgaacttcgtcaaacgcaccatcataacgacggcagttttcctgatttacgcgcaactgtttccggctcagctttatgtggcaggatttggtgttgcggtagtcggtgcattggtgctcggcgtcttgaatggtctgttgcgaccaattctagtgattctgtcgataccaatcacgattctgacactaggtttgttcctgatcgtgctgaatggtttgatgctaagcatgatgacttggttcgtaccaggcattgtgttcagcggtttcggcgctacgatgttgctggcggtcattatttccgtgttgaatatgatgtttgtcggcaaaaattaaagtgacgattgaaaatggcttgcgatctgcaggccatttttgcgtgacttgaatgaactaaaggcttatcgttaccttccaacgaagcgcacaatgtgaatgaccttttgcgaatgtttcaacctgctgaccataaggggaatcgacttatggtaaaatagagcaaatatggcgaaagaaaggtggacttcatggcagacagcgtgacagtgcggcagttggttaaggcaaccaagctcgaggtatacagcggcgaggagtatcttgatcagcggcaagtcgttttgagtgatatttcgcgtcccggcttggaactgactggctattttaattactatccacatgaacggattcaattgttcggtcgaacggaaatttcatttgcgcgaaacatgtcatccgaagaacgtttattgattttaaagcgcatggcaactgaagataccccagcatttttggtatcgagggggttggaggcgccggcagaaatgatcaccgcagcgacagcggctcatattcctgttttgggatcgcgtttgccgacgacgcgtttgtcgagtctgattaccgagtatttggatagtcagctggcggagaggcgcagtatgcatggggtgctagtcgatatttatgggctcggcgtgctgattaccggcgattctggtgtcggcaaatccgaaacagcgttggaattggttcagcgtgggcatcgcttgattgccgatgatcgggttgatgtttatcaacaggatgaacaaaccattgtcggggctgcaccgccgattctttcgcatctgctggaaattcgtggcttgggcattatcgatgtcatgaatcttttcggtgctggcgctgttcgtgaagatactactatttcattaatcgtccatctcgagaattggacaccagacaaaacctttgatcggcttggttctggggaacagacacaattaatttttgacgtgccagtgccaaaaatcacagtgccagtcaaggtcgggcgtaacttggccatcatcattgaagtcgcggccatgaacttccgcgccaagtcaatgggctatgacgccaccaagacatttgaaaaaaatcttaatcatctgatcgagcataatgaagaaaccgaccagaacagttcgggggacaaataacttgttattagcacttaatccgatcgcttttcaattaggcggtctggaagttcattggtacggtatcattattgccagtgccgttctaattgcggtttatctagcgatgcgcgaagcacccaaacgcgggattaaggaagaccacattttgaatcttatcttgtgggcgttgccgtttgccttgatcggcgcacggctttactatgtggcgtttgaatggccttactatgccgctcatcccggcgaaatcattgctatttggcatggcgggattgcgatttacggtgcattaattgccagtgtcatcgtttttgccatttattgtcgggtccaatggttgccagtttggcttgtcctcgatattgctgcaccaactgtgatgttggcgcaggcaattggtcgctggggcaacttcatgaatcaagaagcccatggtgctgtgaccacgttagcctatttacgcggcttgcatttgccagaatttatcattcagcagatgaacatcggtggggcatatcgtcaaccgacttttctgtatgaaagcatgtggaatctagtcggctttgctttgctcatgacggtgcgtcaccatgagcactggtttaagcaaggcgaagtggtgttgagttatgtgatgtggtacagctttggccgtttctttgttgaaggtatgcggaccgactcattgtatgtcatgcccgggctgcgtgtttcacaattgttgtcgatcatcttatttgttgcagcggctggcttagtttggtatcggcggcggcaaggaaatgtggcatggtatttagacggcaatccgcttaaagcggtggaataggagtgattttgtgccaacgaaaatagcagtgttaggtgctggttcttggggcaccgtgctagccaatttattaactgaaaatggtcatgaagttgatttgtggagtcacaatccggatcaggtagccttgatgaagcggacgcatcaaaatgaacactatcttggtgctgagtttacattacagccggctttgcatgtgactgctgaccttggccaagccttggatcaagcggcggtcattttgtttgttgttccaaccaatgcgattcgcagcgtggccgagcaagttaaaccaattctgcaagctcataaagggcgcggtgaacaaccgattattgttcatgctgctaaaggacttgaacgtggcagtgagttgcgcatctcgcaagtgctcgcagaagtcttgccgaaggaattgattcaaggtattgttgtgatttccggcccgagtcacgccgaagatgtcgccactcacgatatcacaacgttaaccgccgcttccgatgatttgaagttggcagaaaaagtgcagaagctgttcatgaatgattattttcggttgtataccaacacagacgtcattggcgttgaaattggtgccgctctgaaaaacgtgattgccattggcgctggtgccttgcacggtctcggctatggcgacaacaccaaagcggccttgatgactcgcggtttagctgaaatcagtcgggtcggcgtgaagctaggtgccgaaccgttgactttcatcggcttatctggtgtcggtgatctgattgtgacctgtacctcggtccacagtcgtaactggcgagccggcaacgcacttggacaaggtgaaaagttgccggatgtgttgaaaaacatggggatggtggttgaaggtgtctcaacgaccaaagttgcccatcaaatggcccgtgaacttgacgttgacatgccaatcacagacgcgatttatcaagtgctctacgaaaacgcgccgattcgtactgtcattactgacttgatgaagcgttctggtaagccggaattcgattttgacaatgcgagtttacaaaaaccataaaaccatgtatattaaacagtatagcttactaattgtaagcaatatggcaaaaggagagactgcccatggcaaaaaaatatgatgtaatcgtgatcggtgccggcccaggtggtatgacggctgcactttatgcatcgcgtgccaatttatctgtgctgatgctggatcgcggcgtctatggcgggcagatgaacaacaccgctgaagttgaaaactatccgggtttcaagtcaatcctcgggccagatcttggtcagaaaatgtatgatggtgccacccaatttggtgctgagtatgcctatggcaatgtcgttagcgttcaaaaccgcggtgccgtcaagctagtgaaaactgacgaggatgagtacgaggctaaagcgattgtcattgcgacaggcgcagagcataagaagttgggcgtaccgggcgaagaagcctacagtggccgtggcgtttcatactgtgctgtctgcgatggcgccttctttaaggatcgcgagttggccgttattggtggtggcgattccgcgattgaagaaggcctttacctgacacaaatggccaagaaggtcacagttattcatcgccgtgatcaattgcgtgctcagcagattatccagaagcgagcatttgccaatgataagatgcatttcgtctggaatgctcaggttcaggaaatccaaggtgacgatatgaaagtcaccggcgtgaagtaccgtgataaggaaactggcgaggaacatgttttgccagtcgccggggttttcatttatgttggcattatgccgatgactgaagcctttcaagatttaggtgttctggatgaacatggttggattccaaccgacgagcatatgcggacaaaggttccaggcgttttcgcgatcggcgatgttcgcgccaaggacctgcggcagattaccacagctgttggtgaaggtggtacagctggacaaggcgtcttcaactatatccagagtttgaatgatacgaatattgagattaaagcttgatttgaaaacaggttgagatattactcatacccaacaagtaaaggccgacgatttccctctaccctggaaaattgttggcttttttcgtggataattttttgttggatttaaagatactagtgccaaggcatagcaatcgtaggccagatggggctcagccgtgcaaacaacacagcgacggtctctggagctgatgttgttaggcgacttcgagaccggtttttgggctcgaagcgccgtctccgctctagctccgcgtcgccagccccgtctggccggagattgcggagtttggcacggcaagaaagtattagcctagcactgtcctacgattattcggaatttaatgattcacaagtccgacgaggaaattatggctcggcctcttttttgtggatgcgagcagaaacacttagaaacaagcagtcttggaaacttgttttagctagcacgcatcatcggtaataaaagaattttcttatttgagcgcgttttcaacccagcactcgtccacttatagtatgattgggacgggaagggtattgcccgaaattattaattatagacagatgggagctgatcacgtgagttatcgtgatacgtatcaacaatgggtcgacgaaccgacccttgatccggagctgaaagctgatcttaagaatatggctgatgatgagacgactaaggaagaggcatttgctgctcctatggcgtttggcacggcaggcatgcgtggtgttcttggtgccgggattggtcggatgaatatttacacggttcggcaagccactgaaggtttggcccggtttatggacacactgtcggatgaaactaaggcccggggggttgcgattagttacgactcccgttacatgagtcaagagtttgcttatgaaagtgccggggtcttgggtgctcatggtattaagagttatgtttttgatcagttgcggccaacaccggaattaagttttgcggtgcgtcatttaaagacctatgcaggcattatgatcactgctagtcataaccctaagcagtacaatgggtataagatttacggtccagatggcgggcagatgccaccggaagaatccgacaaaatcaccaaatatgctcgttcagcagcggatctttttgctatcaagtctctgaacgtccatgtgctacgcgccaaaaagttgatgcaaccgattggtgaagatgttgatgaagcttactatgctgaagtggccacggtcaccatcaaccatgatttgattaacaaagtcggcaagaacatgtcgttggtttatagcccactgcacgggactggacggattccagcgcaaatggttttgcgtaatgctggtttcgaaaacttccggttggtacctgagcaaagtattgctgatccagaatttgcaactaccccattcccgaacccagagttcgctcaagtctttgacttgccaattgcattaggtaaaaaaatcggcgctgatgtcttaatcgcgactgatcccgatgctgatcggctgggcacagcagttaaagtcggcgaccattatcagttgttgacgggtaaccaaatcgcttcggtcttattgcattatattctggaagcgcgcaagcaagctggcacactgccgaagaatggcgcggttgtgaagtcaatcgtgtcgacggaattggcaaccgccattgcgaaggattatggcgtggacatgatcaatgtgctgactggtttcaagtttatcggtgatcagatcaagcattttcaagctactggcgagcacgaatttctgtttggctttgaggaaagttacggctatctgatcaagccattcgtgcgcgacaaggatgcgattcagtcaacagtgctgctggctgaagttgccgcctactatcagtcacaaggcaaaacgctttgggacggcgttcaggaactgtacaagaagtatggttactatgctgaaaagaccgttggtgttgactttgaaggggttgacggtcagaggcaaatggctaacttgatgaccaagttccgcgaagaacagcctgctgattttgcgggtgtcaagattacgaaggttgaagacttcctgagtcaggaagctaaatctgctgatggcactgtcgaaaaactgaccatgccatcaagcaacgttctgaagtacattttggcagacggtacttggattgctatccggccatccggcaccgaaccgaaagttaagttctatgtcggtaccaaagcagacacagaagctaacgcccaagaaaaattggatgccttcgaaaaggcgctcaatgattttcgtgaagaagcttagtttgttttaaacgaatcaatgtgtgaatcctgacgattaagcaggtgaagcaagatagcggcgaacgtattgtcccaaatttgggacaaggcgttcgccgttttctgtagggactatccggactttttcggtttctaaaagcgattgttcaaggtcctttaaaaaacgttgtcatgcccacagccatgtttctccggtatactttaatcaaggtaatgatacgggggtggcatgatgatgaactatttaatcgttgaagatgaaccggcattaggcgagacactgcgcgcctatttggccaaagacggtcaagccgtgctagcgacctcgttagcgcgagccaatgaacgagtcgcgcagatttcgcccgatgtcatcattttagatctgagcatgcccgatggtgacggcttgacttggttagcgcaatggcggaagcatttgactgctaaggtaattgttttgacggctaatgacgaggagctaacgatgctaaaaggactccgacttgctgatgattacgtggtaaaaccggttagtttacgtgttttaaaggctcgcattgctaaacagctgccgatgacagtgcaacaatttggggcggttagcctgaatttagccactggtcaagtgacgaaaaatgagacagcggttgtgctaaccgcggccgagtatcgtttgctggcctatttttttgccaaccccaatcaaattttggcaagagatcagttgctagcagccttgtgggacacgcgtgagcagtttgtggcggataatactttaaccgtgaccatcaaacgcctgcgagaaaagcttgaggatgatccggcacatccgaccttaattcggactgtgcggggaatggggtattttattgatggttaagcatgattattgggctatgccggaaacaaaaagtgtgttgaaactaacagtgtggctactggctatcctgtggactgttttactgatggtgatggtgtttgtcccagaaactcgtatttggttggctgccatgggtgtcggtggcacgttgatcagcagttggatcgtgtggcgttgggcagtcaggtttagtcgacgctttgatttggcgctgcgacaactagatctgacaaaggcaggtgcaagcaactatgcgattgatcggaatgatgaaggactgttttccgatctcaataatcgactttatcaatatgcccgccaaatgcaggctgaacgcacggcagtgaagcgtgatcgcgatcagctgagtgttgctattaccgatattgcgcatcagttgcgaacacctttagcggcgaataataatttgcttgaaatgatgaccgcagctaattgggaggtcacccgtcaggagcttttagcgcagcacacgcgtcaagcagagttagttgagcagctcattttattagctaaggtggatacacatacgctgagccaaactagacaagatgtgagtgtagcggcgctggggaaagaggcattgaagccactgctgcgaatggttgctgataagcagttgacgattgattggcaggtatcaccagacctaatgcttcatgtgaacccggcattggtcaaagaagcgttggtcaatgtcttgaaaaatgcggttgaacatactgcttttggcggtcaaattcagattattgggattgctgatcctattcgcgtccgcctgaagattatcaatacaggcttaccaattgctgaagcagatatgcctcatttatttgagcgttttttccgtggtcaatatgccactgccaataacgtgggcattgggttagcgatcgctgctggcattacgcgtgaaaacgatggccacttatctgctgaaaataccgcggaaggcgtacaattcacgtttgaattttttcgttgagcgtgttttgtcacttacttgtcacttaccattgataggctgagagtatcataagaaagccaacacagattgatgtgtcaggcgcgaggaggggtactagtggccattttgacagcacgacaactgacgaagcaatatgcaggggaaagtcgaccagcgttagatcacgctgattttagtattgaaaaaggtgaatttgtggcaatcgttgggccgagtggttcgggtaagtcaaccttgctacatctgctgggcggtattgatcaaccaaccagtggtcgggtacagctatacgatacagatatttatgctttggatcagacccaattggcgatttttcggcggcgacaagtcgggttgatttatcaattctataatctgattcccgatttgacagtggtcgagaacatgacgctgcccgctgacttggacggtcgaaccgtcgcgacatctgagttgacagaattactggctactttgggcctgacggaaaagcaagatgctttgccaaatcaactgtcaggcggccaacagcagcgcgtggcgattggccgggcactgatgaatcatccggccattattttagccgacgaaccaacgggcaacttggatcgccgcaattcacaagacatcatgactttattgcgacaggcgaatatcaagcaaggtcagactttaattgtgattacgcatgatcccgatattgctaagcaagcagatcgcgttgtaaccatcaatgacggtgtgctgcgtgaagggcggtgagcgtcatggggacgatgacccatttagtttggcgtcaactgattaaggagaaggcgcgcacgttcacaaccattctggcgatggcagttgctgcgaccttaactgtggccaccttgattggcattaattcggctcggcattcaatgtatcaagataatattcaaaataccggcggcctacagtttgttttatcgaaggttaaccaagaaaccgcactggctattcagaaaaaagccgatatttccgaaagtgtccgctatcagcgacaaggacaaatcagctttgctgatcaggtacctaaccaaccagattcgcctttgttaatgttgccgaaaccggcgctgcagcgattaatccaacccattcttttggaagggcggctaccccaaaatgagcaagaagtcatgttagcccaagatttgatttctgatgtttatgcagtgggcaaaaccgtggcggcacagcgcaatggtcagcgcgtcgttcttaagatcgtcggtagttaccgtggctatgctggcctcatggcaagtgatggcgctgtcaccaccggccattttgacggcacgaagaactatgctgtcgcagcggcttttggcaactatggcaatttttacgcgaagttgaagaaactcacagcgcagtatcatgtcggatccgaccagcagagagtgaacgaattagctttgaaacgggccggtgagtcgcgagatgtcaaggtccgtgccatgttcgtattacttgtcatcgtggtgctaagtgtgattggtttggtgtcattggcgttgatttataccagcatcaatctgagtgtacaagcacaaacgcagcgttatggcttattgcgctcaattggtgcaacgccgagacaaatccggcaatcggtgtatctgcaagcactgactttggcattgccagcgattttactgggtttgcttgcaggaataggtgggttgtcactcgcttttcatgaattgaatcgaatttttaaggcgagtggtaacacctttcagctcttactcacgatcagttggtggccgattttagtcagcggatttttcatgttgcttgtcacgttactagcagcacgacgaccagccaaacgcgccgcacaagtgagtccgattgccgcagttcgcgcgcagtcagcaagtcggaaggtgagtcagcgtatgttacggcaagggatgctgggacgatttttgccgacgccgattgctaaattggcttataaacattatcggcgtttgggctggtcaaaagtcacgatgatgacaacgctggccttgtcactcatgatctttatcggctttaccagtttctttcgcggcatgttaacttttagcgatgaaacgattagtcgccaggcagatgtgacgatcaccaagacacaatcgctggcatcagcgaatttctcttttaatccgaggcgactgccaggggtgaaacgcggaacggtgactggcacaactcaagtcggtttgaaaaacgctcctcaagcatttcatgatcggctgaatgtgatcgtggtgagtgaccaaacgttcggcactgtttttaaagatcggccgacgattatcacaggcagtcggttagtgacgaactcaaaaacaggcaagcgccagcagcaatgggacacgccaaaagattttgcaggaaccttggagcttgctaacgagcaaagtagccaaaagactttaacgcagccgatgaaggtcgtcaccaagactgctgcggaaatgaccgattggcttgtcagtgaccaaagtggtttggtgctttctgctagccggttccgtcaaatcagccaagcactccaaattaaaaatgatgacattacgtatgccattcaagtcttactaattaaaccaaattttcatgagacggtggccagtgctttacggcatgaagtgccacatgcagcactttttgatcaaattgaaaatgatgcgcgtggcagcagctttcagcttgctattcaagtcatggtctatggctttttaaccctgctgacccttgtgagtctggcgaacattgtgaatcatgtttttgctaatctgttgcaacggcggcgaagtctcgccatgctgcaaagtgtcggtacgacacctggtcaaattgttcggatgttggcacttgagaatgggtttctgtttgggacaagtatggtgattgggtctttgctggggacactgcttggctggattctgcatcaagctgtcaacaccggtattacgatggcttttcaggttccttggttagagatggggatggccggacttgcattactggctatctggagtatttttgcagggattagttttcagattatgcgacatcaggatattgatcaattgattcgggtgggttaagacaaaagtgaaatgattgatggcactgatgcttcggtttctaaccggggtggttcacgctcttgctgaaacgcgttcgccaccccagaaacctgcgtgtaagaacctgtctagtatcttttaagaactatcttcaggaaggccaataccaccatttgaagactgctgttaagggcgcgttcacagtttttccaaagtcgccgacatttgtctagccaactccatgaacgttcaatgatccatcgttgcggtaacaccgtgaacgtatgcaactcgttgcgtttagctaccgtcgtcttagcattcaaaatgagcttcacctgatccgcaaagtcattgccagtgtagccaccatcaaccatgacatgctgaaccagctctaaattttggctagccaaactaaacatagccaatgcacctgaacgatctgatacattagctcgtgtcacgagaatggcttgtggtaaaccattaatatcaaccgccatatgacgcttaatccctgaaatctttttgccgccatcgtagccactatttttcgttaaatcagtggttttaacactttgagcatcaacaatcacaaacgacgttcgggccgatcggccctgtgcaaagcgataggaagcaacagtttttttaaaagcctttctaatagcgaatcagctgtcgggtctggtttatctcgccacatatcgtaatagcggtagacagtgtgccattccgggaaatcgtgcggtaattcacgccattgacaccctgtagtaagcgagtaaaggatggcattgaatacgtcataaagatcataacgacgcggtcttgtatgcttgcggaagttttctaaatcaggttgtattaacgcaaattgcgctcgagaaatattgcttggataatctggcatgacaaacgcctcagtcggttttccacaattctaccagattcagcagatactagacaggttctaaggatcttgaacgcaatggccaaacccgggccatcaccgttcaaggccgcttacactccggtttctaaccgggctggttcacgctcttgctgaaacgcgttctcaggcgcagaaacctgcacataaggacctcggacataaatggccaaagcccagccatttgtgtccgaggccacttatgctccggtttctaaccgcgcctgatcacgctctgctcttgcaatgggcttcacaaggtggtagtcttttaacaatttaatttactgccatcactatcacgccacgaatatcaggaggtcatttaatcatgggcatgcaccaatttatccaaggactaagcaacttagagacactgcgtcgggcaccgggattctttaagtatcaggaacattcagtggcggcacatagtttcaaagttgccgaaatcgcgcaaatgctaggcgatgtcgaggagttagctggtaacaaggttaattggcagatgctctatgagaaatctctgaatcacgattatactgaacgttttatcggcgacatcaaaacgccggttaagtatgctaccccgacactgcgccacatgctggctgatgttgaagcgaccatgacggagaactttatcaaaaatgaaattccccgtgactttcaggatcgctatcgtcgtcgtctttctgaaggcaaggatgaaacgcttgaagggcagatcttgagtgttgctgataaaattgatctgctatacgaaggttttggcgaaatcgagaaaggcaatcctgaacaggtttttctggatatctactccgaaagcttaagcacgatcctgcaatttcggaatcgtcctagcgtgcgctacttcttggaggaagtgttgccggacatgcttgatgaaaaatttgccagccgcgatcagcttgctaaactgactaaagaaaccatggcagaacatgaaccaaacaagtagcgaaagtatgttcgctatgttataataagcaagacaaaagttggaatgcgcatcatgtcgattccaacttttttgatgacgaaattttgtttggataatgtaaaaatgcgttcactggggcctttttcctgcacggattgacacgtgttcaccttgtattcggaatgaatgatgcccatgtgattgttttataggaggcatgtcgatgatcgaacgaatagccgatcgtaaatttgatctggtttcaccttaccaaccagctggtgatcagccacaggccattgccaagttgacaaagggctttgaagagggtaagaaagaacagatcttgttgggtgcaactgggactgggaagacctttacgatgagcaacatcatcgccaacttgaacaagccgaccttgattttgtctcacaacaaaacattggccgggcagctttatggtgaattcaaggaattcttcccgcataacgcggttgagtattttgtttcctactatgattattatcaacctgaagcctatgtcccgagtaccgacacgtatattgaaaaagacagtgcgattaacgacgaaattgataaactgcggcacagcgccaccagtgcgttgttggaacgaaatgatgtcatcgtggtggcctcagtgtcgtcaatctttggtttaggtgatccgcatgaatacaagaatcatgtgctgtcattgcgaactggcatgacgattgatcgtaatacactgttacgccaacttgtagatattcaatttgatcgaaacgacattgattttcaacgtggtcgctttcgagttcgcggcgatgtcgttgaaattttcccggccagtcgtgatgaccatgcgattcgagtcgagtttttcggtgacgaaattgatcggattaccgaagtcgacgcattgaccggcgaagtcatcgggacacgtgatcatgtggcaattttcccggcaacgcatttcatgaccagcgatgaacagatgcagcgagcgattaagagcattgctgctgagttagaggcacaattgaaagtcctgcgcagtgaaaacaaactgttggaggcgcaacggttagagcagcggacgaactatgatatcgaaatgatgcgggaaatgggtttcaccagcggcattgaaaactattcacgccatatggatggccgtaagcctggtgaaccaccgtatacactgctggactttttcccgaaagacttcaacattatggtggatgaaagtcatgtcaccatgccgcaaattcgcgggatgtacaatggcgatcaagcgcggaagcaaatgctggtcaactacggcttccgtttaccaagtgctttggacaaccggccattgaaaatcaatgaatttgaacaacatgtccatcgtattttatatgtgagtgctactcctggtccttatgaactggatcgggttcctaaagacgatattgctgagcagatcattcggccaaccgggttgttggatccgaagatcgaggttcgaccggtcatgggtcaaattgatgatcttgttggtgaaattaacaaacgggttgatgctcacgaacgtgttttcatcaccaccttgaccaagaaaatggctgaagatctgactgactacctgaaagacatgggcatcaaggttcgctacttgcatagtgacatcaagacacttgaacggacgcagattattcgtgatctgcgacttggcaagtttgatgtgctgattgggattaaccttttgcgtgaagggatcgatgtccctgaagtttcgttgattgcaatcttggatgctgacaaggaaggctttttgcgtgccgaacgttccttgattcaaaccattgggcgggcttcacgtaacgagcatggcaaagtcatcatgtatgctgataaggtgacagattccatgaaggctgccattgatgaaacccaacgtcgacggacgattcaggagaagttcaacgaagaacatcacatcacgccaaagaccattatcaaaccgattcgggcagctatttccagctatgaacaatcagatgatgataaagccgaggccaagaagacttttgctgaagttgattatgaggatatgagcaaggctgataagaaggagttagtagcaaacctgcgctcacaaatgcaggcggcagctaagaagcttgatttcgagcaggcagcgtcattacgcgacacaattcttgaattgcaggctgatatgtcttaatcagatcgcacttgcacgatggtaccaagtcagccaagattgctttgaacagatccggtgagcgcgaaccagcccggttagaaaccggagcataagtggccttgaacgtgatggccggtctttggccattgcgttcaaggtccttatgtgcaggtttttgggctggcgagcgcgttaaggtgagcggtcagaagtcggcgtataagctgttgtggcaatgtgattttcgccaatactgcttgctaaaaatgaggagatcttttgtgaatggcaaacgataaaattgtgatccatggggctcgtgcccacaatttaaagaatattgatgtgacgataccccgcaataaactggtcgtgatgaccggcctatctggttcaggtaagtccagtctggcttttgatacgctttacgccgaaggtcagcgtcgttacgtggaaagtctctcagcatatgccagacagtttctgggacagatggaaaaaccggatgtcgattcgattgacggcttaagtccggcgatttcgattgatcagaaaaccacttcaaaaaatccccgatcaactgtgggaacagtcactgaaatcaacgattacttgcgcttgctgtgggcacgtgtcgggcatccgatttgtccaaatgatggtacaccgattaccagtcaaagtgttgaacagatggtggatcgcgttttagccttacctgataagacccggattcaaattctgtcaccagtggtgcgtcgcaagaaaggcagtcataaaaaagtcttcgccaaaatcatgcgtgaaggttatgtccggatgcgtgttgatggtgaagttgttgatgcaacggctgattatgaactggataaaaataagtcgcatgacattgatattgtgattgaccgaattgtggttaagcctgaggcgcgcagtcggcttttcgactcatttgaagcagctctgcggttgtcagaagggtatgccaacgtggacgtgattggcggtgaaccactgcgcttttccgaacattttgcctgcccgatttgtggctttacgattggcgaaatggaaccacgactattttcattcaacgctccttttggcgcttgcccagaatgtgacgggttgggtgttaagctgacagttgacatggatttggtgctgccagaaccgagtatgactttggcagaaggggcaatcgcgccatggaatccaatcagttcccagtactatccggaactgctggctcaggcggcgaaaaccttcaaagtacgaatggacgtaccctttaacaagctgacccaccgtgagcggaatgtggtgcttaatgggagcgacggcaagttattccattttcattatgaaaatgactttggcggtgtacgcgatgttgatgtgccttttgaaggggtgctgaataacatttcccgccgatatgcagaaacgaatagtgattttactcgccagcagatgcgcagttatatgacagcattgccgtgcccggtttgtcacggcaaacggctgaatcggcaggctttggctgttaaaattgaaggtcgcgatattgcagaagtttctgatcttgccatcaaggatgccctaccatttttcaaaaccgtgcatcttagtgaagccgaaagcgtcattgcccaaccaatcgtgaaagaagtcgttgaccgcttgacattcttggtcaacgttggtcttggttatctcacattgagtcgtagtgctggtacactatccggcggcgaggctcagcgaattcgcctagctacccaaatcggttcgaatctgagcggcgtcatgtatgtgcttgatgaaccatctatcggcttgcatcaacgcgacaacgatcgcctgattgcctccttgaaaaaaatgcgcgatcttggcaacacgttgattgtggtcgaacatgatgaagatacgatgcgcgccgccgattatctgattgatgtcggaccgggggctggcgaacacggtggccgcatcatggcatccggtacccctaaacaagttgcacgtgtgcgcaaatcaatcactggccaatatttatcagggcgcaagtttattccggtaccactaaaacggcgacaaggtagtggcaaagtgattcgtttggaaggcgccactgaccacaacttaaaaaacatcgacgttgattttccattaggtaaattcatcgtggtttctggtgtttctgggtcaggtaaatctactttggttaactcgattcttcggcgtgcattggctcaaaagttaaatcataattctgagaaaccgggtccatacaaaaagattcttggctataaaaatattgaaaagctgatcaatattgaccaaagtccaattggccgcacaccgcggagcaatccggctacctatacgagtgttttcgatgacatccgcgggctatttgccgaaaccaacgaagctaaattacgtggttacaaaaaaggccgctttagtttcaacattaagggtggtcgctgtgagaactgtaaaggcgacgggatcatcaagattgaaatgaactttttacctgatgtttacgtgccttgcgaagtttgccatggcaaacggtataactctgaaaccctcgaagtaacgtataagggcaagaatattgctgaagtgcttgatatgactgtcgaagaagccactgacttcttcaagaatattccaaagattcggcgcaagttgcaaaccatcgtggatgttggccttggttacgttaagctgggacaaagcgctaccaccttgtctggtggcgaggctcaacggatgaagcttgcaagcgaactgcagaagctttcaaccggcaagaatttttatattcttgacgaacccaccactggtctgcatacggatgatatcaagcggctgctggaagtgttggaacggctagtcgatgaaggcaataccgtactggttatcgagcataatctagatgtcgtcaaaacagctgactgggtcattgatcttggccctgaaggcggagacggcggcggtcagatcatcgccaccggcacacctgaacaggtggccaatgtggccgatagttatactggccaatacttgaaaccaatcctcgttcgcgacactcaacggactaaggaagctgcgcaaacatcaactaagaatgaagcgcaggcagtaagcaagaagtagattgactgaccaggttggaccatcattcacggcggttaataagggcaaacaatgacaccaaaaattgtttgcctttttgatatgggaaatttattagaattttcgagacactagtaccaaggcggagcaatcgtagaccggatggggatcagcagtacaaaaagcacggcgaccgcgttttgttactgatgttgttaggcgacttcgagaccgcgagctttgcgggcttggagcgttgtctccggtctagcaacgcgtcgccagcccagaaaccgacttgtttcacactctgatttgctcattctcgtgcttaatattatgatgaataggattaagaaagtagggaaatagatgttaaatcgaaaaagttttggttttgactgggggcagtttatcactggtatcctgttcctgatcgccgcatttgtcgtcatgcgctatccgctggcaacattgaaaacggtgacctttatctttgctgttgttgccattattcgtgggattgcgattttagcagggtattcaacgcttcgccagctcactggtaaactagcttgggtatcgctcttgatggggatttttgaccttgttattggtgtcattttcctggtcaacagtaattttggtgttgcaacgattaccatgatgtttgcaatctggttcttagttgattcagttggttcactattcaacgtgggccatttgcggattgcaggtactggctggtttgtcctttacctcgttttggatattctggcagtgattgtgtctttgatgctgttcatgcagccagtggttgcggccatcacgttggtcacattattgtcgatgtttttcgtcctattcggcatcgaatgtattgtccttgcctttgcacgacgcaatatttaatgaacatcgcttttatttaacctgatgcagctgattcattgcgctgcatcaggttttttaataacaacgcttgatgatgcggtgaaaagaaatcggggatcgataggaatgacacgcccggcatgttatacttgaataaatatgatcaaaaaggagccttttatgactgaaagtttggatcttgtcattatcaccggtatgtccggtgccggtaaaaccgttgccatgcaggcattcgaagacctgggatatttttgcgtcgataatatgcctccagctttgttgccgaagttttgggaattggtaaaagaatccggaaagatcacgaaggtcgcgcttgttgtcgatctgcgcagtcgtgctttttacgatcagattatcgatatgctggctaatttggacaacaatgcctatgttcattctcgcatcttattcttggatgcaactgatgaagagctggtttctcggtacaaggaaacccgtcgctctcatccgttggccatggaaggccgattgatggacggcattaaaaaagaacgtgcattactcacagaattacgcaatcgcgcgcaggttgtgattgataccacgaccttaagtccacgtcagttacgggaaaagattttccttaactttaaggaaagcggtagtcaaccagcatttcatattgaagtcatgtcattcgggtttaaatacggattaccaatagacgctgatattgtcatggatgtccgtttcctgcctaatcctttttacattaaggattatcggcccaagactgggcttgatccggaagtttacaattacgtgatggataatgaagatgccgaaagtttctataacaagttttatgatctattgtctgaaatcatgccaaagtacaaggcagaaggcaaaaccagcgtaacgattgcgattggctgcacaggcggccagcatcggagtgtggcttttgccgagcggattggtaaggcgttttcagatgcatatgccgttgatatcacgcatcgagacattaagaagcataaggagacggtgaatcgctcatgagtcgtgaaactaaatttattcgggtcatccgcggtcggcgtccaaaggtggttgtcattggcggtggaacaggcttgccggtcattctgcatagtttgcatgagcaagatgcagatgtgactgcaattgtgactgttgccgatgacggcggttcatcagggacaatccgcaactatatcaacgtagtgccgcctggtgatattcgcaatgtgctagtggctttatcggagttgccgagtttgtatttggatatttttcaatatcggttcaatacaactgatgcttttttcgctgggcatgcgattggcaatctgattattgccgcgctgtctgaaatgaaaggcggcattttcccagcggttcagcaactaagcgaaatgatgcaagttgatggtcacgtttatccggccagcaacacgccgttaaccttaaatgctgaattcaccgatggtacaaagctgtctggtgaagctgagattacagcggctgggaaaaacatcaagcatatttcggtttcagaaacagatcctgccaatggcaaaccagaggcggtcaaagaagttatcgatgcgattatggacgctgatgttgttgttttaggcccaggcagtcttttcactagcattttgcctaacttgatgattgaaaatctgggggatgcggtgaagaagacgcaagccgaagtgatttacattgtcaatatcatgacccaaaaaggcgaaacccagcattttaccgatgccgatcatgtccgggttctgaatgaacaaatgggcgagaactttgtggatacggttttggttaatattgaaccagtccccgataattatctggatcatcaaaagtacaacgaaattctcacgccggttaagcataactatcaaggcttgcgagacatgggctgccgcgtgatttccgaagactttttaaagttgcgcgatcatggtgtctttcatgatggtgataaagtcgccaaggagattttaaacttggcttttcaggtcagcggcaaaacccggaggtgagggtatggcaagttttgccagtctggtgaaaaaagaactgacacagctcgaggtacatccagaacatgctaaggctgaactgtctgctttgattcgtatgaacggcagcctgacactgatggctcatcgttttgtgttaaatattcaaaccgaaaatccggctattgcacgtcggatttatagcttgattcgccaagtctatcatcacgaagctaatctggttgttcaccgtaagatgaagctcaagaagaattatcaatacattgtgcggctaacagaaggcgtcaatgacatcttgtcggatctatcaattttagatccggataccatggcgatttcaacaaccgttccagcttcggtgttgaaggaaccgcagcggatgcgttcttatttacgcggtgcctttttggccagtggttcagtgaataacccggaaacctcgcgttatcatctggaaatctattctttatacgataatcacaatgctggtattttgaaaatgatgaatcattttaatctgaacgctcgcaccgtagaacggcgaagcggctacattgtttatctcaaggaagcagaaaagattgccgatttcttgcaggttattggggccacgaatgccatgctgaagtttgaagatgttcggatcatgcgggatatgcggaattcagtgaatcgattagttaactgtgaaaatgcgaatatgaataaaacgattgacgctgcacagaagcagattgagaatattaactatttaaagaaccatgttgggctagataacttaccggccaaattgcgggaaattgcagttttacgtttagcacatcctgacgtctcgcttcaagagcttggagcgatgatgccgagcggccaaatttcaaagtctggggtcaatcaccggttgcggaaattgaatcagattgctgaagggtatcaacaaccagaagaagcttgagcactaatgcgaagtgggttgcgttcatcataatcgggtgttgacaatcaacaaatcaatccctttgtttcctcaagctaatcgtgtacaatgtaaccgacatcaagttatttttttgctgaagattgactgttttggacgcatgtcgatgtcttttagcttggatgtatccctttggcgacgacttgtttgaaggagccgtgatgatcttggcaaccagagagaagcgccattgcttttttgagatgactgtcttgaagcaatgacgtgagccccgtcggtgttgatggtggctaataattgatagatgagcgcatttttcacagtgtggacggcttttgcgagctgttcgcgcgtttagaggtaagttttaggaggaagcagcatggttaaaccgattactttgaacgaacagctttgttttgcgatttacaaagcacaaaaacaatacaatcatttctattcacaagcgctagccccgttcaagttaacctatccgcagtacatcacgttattgtcgctatatgaacatggcacaatgtcggttaagcaagtcggacaaacacttgaactggatagcggtaccttgacgccgttaatgaaacggcttgaaaaagatggttggatcagtcgcaagcgttccactgaagacgagcggcgagttgacgtcagcctgacccaaaaggcgctggacgcccgtgatcagatttttgaacacgttggctcctgcatggaattaatgaaccttcctaagcctgagtatgatcatattaagtcagaagtcagtcgggttgatgagcatttaagtgccattcccgacggcgcttttcccgaagcttaacatcaaaaaataaggtcaaagatttttatctaaatctttgaccttatttgactttagttgtatacttagcactgtacttttaagagtgctaataacgattatcaggaggttaggacatgctagtacctaccgtcgttgaacaaactagtcgtggcgaacgtgcttacgacatttactcacgtctattaaaagaccgaatcattatgttatccggtgaagtcaatgatcaaatggccaattctgtcatcgcgcaactgcttttcttggacgcgcaagactctgaaaaggatatctatctctacatcaacagtcctggtggtgttatcaccagtgggttggcgatgctggatacgatgaacttcatcaagtcagatgtgcagactatcgccatcgggatggctgcctcaatggcgtccgttttgctggctggtgggacgaaggggaagcggttcgcattgccgaactcaaccatcctgatccatcaaccttcaggcggtgcccaaggtcagcagaccgaaattgaaatcgctgctgaagaaatcttgaagacacgtcgcaagatgaaccaaattttggctgacgcaactgggcaaacgattgagcaaatcaagaaggacaccgagcgtgatcattatatgagcgctcaggaagccaagggttacggcttaatcgatgatatcttggtcaacaaaaatacgcaaaaataagctgtaaaaagaaaagcgcgttgccgtatcgtggcaacgcgcttttgtttccccgaaaagacttgcaaagcgagggcatattgagtaatataattaggtacttgcgcggttagtgtaatggatcgcacgtgagattccggttctcgaaatccgggttcgactcccgggctgcgcagaaacccggttaaatgggaaaaggtaggacagcaaaaaccggctcttcgtcaagtagagttgatagatcttttgtgaagcatctaggccttaattggtctagatgcttttattatgctgctgccttgctgctcttagctctgaaccaaacccgttccaggaatatacgattgatgaaattgttccaattcgtatagccgtacgcagtgttcttaatcttcttgatgatgccgttaataccctcaaggaagccatttgagtactcatagcgtaatgcattgatgacttgtctcttgtacttctttaacgttttgatagactgatccattcggtttcctaatgatcgatagctctctagtgcggctgcgagtgctgacgcatcacgctttctaaccgctcctataatctcctggtagacttcatatgctgcccggaactccgggctcaggtctaagcacttggcgaccagatttacagttgtttcgtaatagccgacgctggtgtgatacgtgggttttattgcttcaagttcgttgaagtccttaagaaagattttccactcgcgtttcatgaatcggtattccttgctacgcttagatagacccttcattacttggatacggaccatgttgagggcggtcgacaccatctggacgatatggaaccgatccacaactatcttggcgtttggaaacaaacgtggaactaggttgatatagccggcgttcaggtctaacgacacggtctgcacttgctggcggacactgagtggaaagccttcaaagtacttcgttattgcgtatgccgtccggctcggtagaattgcgccaatctggtgtcgatcgccatcaccccagatgaagctcattttgttggtagctttgaactcatcaaaagccagatgcttcgggagccatagcttttgatggtagttatacttcgccgcttcttcatcaataatccgctggacggtcttatcagccacgtggaagcgtcgcgcaatgtcggttaatgaacagttgctgaaggcttcaaatagcaccatctggcggactggggtgctgatggtgctacgcggtcggacgtaatcagtctcactctgaaagaccgaccggcacaactcacaacgaaatctctgacggctaagcttcatataggtgggacggtagctgtaactgggcataagtacgcaggtacgttcaaacccataacgaactagtttgctggcaaagccacaggcagggcaatgctctggttggagtttaagttcggcatagaagacaagggctttagcgccccgaatttcttcaatgacagcgtcttgcgtaaagataatgttagggtccttgatttctagaaccattcggatagacttacctgtaagggacattacacaaactcctattctctattctttggtcgggacagtgaacgagcagaaagtgtaatgtcctttttgcgcgttcaaatatagaaatggtatagaaaaaggagctggtaggcaagctgcctatcaactccaaatatcgtagcgcccaaaaaccccgagaaatcggggtttttgttttggtttgaaaaagatgcagccatggccttacatgttttttgcagaacttttgtgtcaataattcgcaacaataaagaaatcgaattatttatttaaattctgaatggcatagttagcttcatcagcggtgaatttttcaccattttcagaggttaattgctcacgaacagcatcaggggacatatccatatccttttggtatgtttttgctttggcaagtgcatttttattccaatcggctttgacattttcaatggcatagttcgcttcttctgccgtaaacttttcaccgctttgagaggtcagttgatcatagatgcctgcctttgacatatgcattgaatcggcataactcttagctttgttcaacgcgtttttattccaatcagctttaaggtgatcaattgcatattgagccgcttcggccgaaaacttttcgccactttgcgaaactaattgatcgtaaacgcctgcttttgacatgttcatttcagatgcgtaggtagttcccttattcaaagcagattgatattctgccggaacatttgctgtcttactttcgcttgtagcctctgacgccacacttgattgctggtcgcttttgtcagccgctgaagaggatgaactctccgcagcggtatttgagttgtttgttttacttcccgtcatattcacgccaacaatgatgaataaaaccacaatgatccaaaaccagattcgcttgtaaattggtttctttttcttcattttgaactcccccatgaagatttcttaaaaaggtgcagtgaaatcaaaaattagctgtagctagaactaagcctccctttctcaagtaatgttgtcactttgcggttaacatcctttccgctcacaaagaaaccgctttcaattatcatatgcaaaattgctaaatttagcaaatctcaatgcttatttaggggaaatcgtgatccaatcgtgaattgttaaattttgaatgaacaactttccctttatgaaaggtgagtttacgtgcctgaaaattgaactcaacaaaatgcactagtgaaaaaacgatgtatgctattagtgactttatacacgaaatgagccactttccctcgcatgaaaattccattagaaacaacccgaaactcgctttcaaaaaaggctgcaagaggggaccagattttagtaaaatccgaataatcttcacatcaataaaatagatgttccaagtttgccgaatatgtgattgtttctggacgattagggccgcagacttgcgataaagcggaacccctgctacaattggtcttgttggtaaaggaaaacagcatttgttgggttcctaatttttttcagcttgctgggtcggcgaacgactcggagggacgtgaaatgacccattaaagaaagacgtgccttatgcatactgaacttgcgtggctcaaagcgatcgcgcctgatctgatgggcgttgtcactaaacgctatcaggtccttcaatttattaactggatggcaccagttggccggcgaacgttggccgaacagatgaagatctcagaacgtgctttgcgcacagaaacggattttctgcgtagtcaaggtttgttggaaagctcaaaatctggcatggtgctaacagcaaaagggttagagacatttcatggccttgatcatcttatgaatcagctgttaggaattaaggatgatgaaaaacgacttgctgcccagcttcaaatcgatcattgtttggtcgtatctggcgatgccgatcaaagtggtcgggtgcttgatgagctggggaagacgttgaattcgaccttacaattactgctgccgccgggtcgcttgacggttgccgtgatgggtggaacgacaatggcacatcttgcaaggcagctgacatttcagttgtctgcaggacgtgaattgacgtttgtccctgctcgcggtggcttaggcgaagcggtgacgattcaggccaactcgattgctgctgcgatggcggaagcaaccgacagcaactaccgagcgttgtatgtaccggaaaatcttagctcggaatcctacgaatcattgattaaagagccttctgttaaagaggttttagggctgattgataaggctcaggtcgtgattcatagtgtgggtgacgctttagtcatggctcgtcgccgtggcatgtcatctgacacgatcagcatgttgaaagccaaacatgccgttgccgaagcattcggtgttttctacgatgcgagcggcaaggtcgtttacaagataccgcagattggtttacagctcgcggatcttgatcatataccgtatgtattcgctgttgctgctggcaaaagtaagtccaaagcaattgcggcatatatgcaacacgcaccgagtcggacgtggctgttaacagacgtcggtgcaactaattcgattttaactggggcaacccgttagaataaaaccttatttcctaaaggaggaaattttagcatgactgttaagattggtattaatggttttggccgtatcggtcgtttggcattccgtcgtatttacgaattgggtgcaaagagcaatgacatccaggttgttgcaattaacgatctgaccagcccaaccatgctggctcacttgctgaagtatgattcaacccacggtactttccctggtgaagttagtgcaaccgataacggtatcgtcgttgacggtaaagaataccgtgtctacgcagaaccgcaagcccagaatattccttgggttaagaacgatggcgttgactatgttcttgaatgcacaggcttctacacctctgctgaaaagtcacaagctcatttggacgcaggcgcaaagcgtgttctgatttctgccccagccggcaagatgaagaccatcgtttacaacgtcaacgatgactctctgaatgcagacgacaagattgtttctgctggttcttgcacaaccaactgcttggcaccaatggcttacttcctgaacaaggaattcggcatcgaagttggtaccatgaccaccgttcatgcttacacctcaactcagatgttgcttgacggcccagttcgcggtggcaacctgcgcgctgcacgttccgctgctgctaacacgattcctcacagcacaggtgctgctaaggctatcggtttggttatcccagaattgaacggcaagttgcagggtcacgcacagcgtgtttctgttgttgacggttctttgaccgaattggtttccatcttgaagaccaagaacgttactgctgaccaagttaacgaagctatcaagaagcacaccgaaaacaaccctagctttggctggaacgaagacgaaatcgtatcttccgatgttatcggtacgacacaaggttcaatctttgatcctacacagaccgaagttacaactgctggtgactatcaattagttaagacggttgcttggtacgataacgaatatggctttacttgccagatgatccgtaccttgctgaaatttgctactctctaatccggagtaacgcttttctagccgcaacatccgaagcggagggagcttactccctccgctttttttggaaataggcgatcaattctcaggatgttttagcatcctgctgaaaacgagcgcttatttctggtgttaagcggtcgttacttgaagttaagtcatctttaggaaaaataggaggtcatttctcttggctaaattaattgtttcagacttagatgttaaggacaaaaaagttctgatccgcgttgacttcaacgtgccgatcaaagatggtgttatcggtgatgataaccggatcgtggcagcattgccaaccatccagtatgttattgatcatggtggcaaggcaatccttttgtcacatctcggccgtgtcaagaccgaagaagacaaggctaagctgaccttgaagccagttgcagaacgtttgagtgaattgctgaagaagccagtgacatttgtcccggcaactcgcggcaaggaacttgaagatgctatcaacaagatgaatgatggcgacgttcttgttatggaaaacacccggtttgaagatcttgacggcaagaaagaatccggcaacgatcctgaacttggcaagtactgggcaagtcttggcgacttattcgttaacgatgcctttgggactgcacaccgcagccatgcttcaaacgtcggcattgcttccaacatgaagcaaactgctgccggcttcttgatggaaaaggaaatcaagttcttaggcgatgccgttgacaacccgaaacacccattcattgctatcttgggtggtgcaaaggtttccgataagatcggcgtgatcgaaaacttggtacctaaggctgataagattcttatcggcggcggcatgacctatactttctatgctgctaagggtatgagcatcggtaagtctttggttgaaaaagacaagatcgaacttgccaagaagatcatggatcaggctggcgacaagctgcttttgccggttgattccgttgttgcaactgaattctctaacgatgccccacataaagttgttgacggcgacattcctgatggctatatggccttggatatcggcccgaagacaatcaaagaattcaaagatgctttgcaaggtgccaagaccgttgtttggaatggcccaatgggtgtcttcgaaatgagcaactatgctgaagggacccttgaagtcggccgtgcccttggcgacttgaaggatgctactacaattatcggcggcggcgattcaacagctgctgctaagcaattgggtattgcacctaagattacccatatttccactggcggtggcgctagccttgaatatcttgaaggcaagaccttgccaggtatcgcagctatttctgacaagtaattgtcaggcatgctgatctaacagtcactaccggcagacggtgtctgtcggtacatatgaaaggaagatatgccatgcgtacaccattcattgctggtaactggaaaatgaacaaaaatcctaaggaaacgcaagaattcttagacggcgttaaaggcaagttgcctgatgcaagcaaggttgagactgtcattggcgcacctgccattgatttgaccaccttagttgctggcgctgaaggcacacctttgaagacggcggctgaaaactgctactttgaagacgaaggtgccttcactggtgaaaccagcccgaaagctttgaaagaaatgaacgttgattacgtcattatcggtcacagcgaacgtcgcggctatttccacgaaaccgatgaagatatcaataagaaggctaaggccatctttaagaacaatcttttgccaatcatttgctgcggcgaaagtttggctcagcgcgaagctggccaaaccgaagactgggttgcttcacagattgaagctgctttggccggtttaagtgctgaccaagtcaaagtttcagtcttagcctatgaaccaatctgggctatcgggacaggtaagacggcaactgccgatcaggcacaagaagttgtcgcacatattcgtgcaacggttgagaagttgtataataaagatacggcagatgctgttcgtattctttacggcggctctgttaaaccagcgaacgtcaaggaattaatggctaagcctgatatcgatggcggtttagtcggtggcgcttcgatggatcctgaaagtttcatcgccttggctaactaccaagattaatctgggttctactattaaacagccttctggcaaaaaggagaagaatttatgtctatcattactgatgtattggcacgcgaagtcttagactcccgtggcaaccctactgttgaagttgaattgtacactgaagacggcggctttggccgtgcgttggtaccatcaggtgcttcaaccggtgaacacgaagccgttgaacttcgtgatggtgacaaggatcgttttggcggcaagggtgttttgaaggccgttggtcatgtgaacaacgaaatcgctaaggcggttattggccttgacgtgactgaacaacgcctgattgaccaaaccatgattgcccttgacggtaccccgaacaagggcaagtttggcgccaatgctatcttgggtgtttccttggctgcagcccgtgctgctgctgatgaagttggcctgccattgtatcaatatcttggcggcccgaatgcccacgttctgccaacgccaatgatgaacgtcctcaatggtggtgcacactcaaccaacaccgttgacttccaggaattcatgatcatgcctgttggcgctaagagcgttcgtgaagctgttcggatgggttcagaaaccttccatgctttacaggcactgttgaagagtaaaggcgacatcaccgctgttggtgatgaaggcggctttgccccgaacttgaaggataacgaagaagccttcgaacttcttgttgaagcaatcaagaaggctggctacaagccaggcgacgacattgctttggcctttgacgttgctgcttcagaaatgtacgatgccgagagcaagacatacacaaccaagtggtctaaccctgacaagaagtacaccactgaagaatggaccgacatgattgatggttacattaacaagtacccaattgtttctgttgaagatcctatcgacgaaaacgactgggaaggctggcagacattcaccaagaagatgggcgacaaagtccaaatcgttggtgatgatctgtttgttaccaacaccgactacctgaagaagggtatcgatatgggtgttgctaactccatcctgatcaagctgaaccagatcggtacattgaccgaaaccttcgaagccatcgaaatggctaaagaagctggttacacagctgttgtttcacatcgttccggtgaaactgaagatacaacgattgctgacttggttgttgcaaccaacgctggccagatcaagactggttcaatgagccggacagatcgtatcgctaagtacaaccagttaatgcggatcgaagatcaactgggtgcacaatccttgtacaagggccgcaagtccttctacaatgtgaaagcaatcgactaatttgcttaattagttggcagcttggaaagcacgtttccgttaaggagcgtgctttttttgtggagcgtgagctggcgcggttagaaaccagagtgtgtaagttcaaggtccttacatgcaggtttctgcgccagcgagcgcgtttaattgtgcgcgaacaggagcgcttagaagccggaacataagtggcttcgaccaaatggcgtggttttagcgaggtcgcttgggttgaaagaatcaggattttttaatcggtgagactgaatcgcggttgtcgggtgcacctttctgtatactagggataagcacaaatgaaaggacagttttctatgcaaacgacgccacctcattggcaacgaaacattgctatctttttgcttggtcaatttctttctggcattaccagtatgacggttcagtatgcgatcatttggtacttaacggctaaaactggttctgcaacgattctcagcattgctactttattaggtatgttgccgacgattttgctgagtccttttgtcgggccttatattgatcgcttgaacaagaaaatgttgttgattgtaccggatattgtcgccgctatggtggcacttattttgagtgccgttggcgagttcggtggcttttttcctgtttggctgatctttgtgtcgttgctggtgcgggcgttggcacaaacattccagatgccgacgattcaggctattttgccaaccatggtccctggtgatcagttgacgcgcgtgaacggtcaactcggtgtagtgaattcggcgaacatgattattgcgccggcactgggagctgtcctttttggcctgatgccgatgccgcttttgattttgttagatgttttaggtgcgattctaggagtcagcttgctgttgttcgttagtattccagaaaatcgcttggtcgggacaaccgtccatgttgcgcaggatgccaaggtcgggtggcaattgttgcgaggcaatcgtggcctgtggtatatgactttaattggcatgttgacgacgtttgccttcatgccagccgctagtatgtatcctttaatgaccatgcgttattttcatggcactgtcggtcaagctgggttgattgaagttgtttattttgctggctcgttacttggcggcctgctcattagcgtctttggccattttcgtgatcgtattcatccgattgtctgggggatggtggtcattggcgtgacgtttggattaagtggtgttttgccacgaactgaaaatggctttttatggtttcttatcttgaatggcgttgctggcttagcttggccgtttttcaacacgcctctgatcgcgatgtatcagcaaagctatgctcctgagacgctcggacgggttatggggattttgaatgcgctaatgagtctgccagggccggtcggcttgatctttgctggtcccatcgccgatcgctttggtgtcgcaactttatttgtagttgcagggatcggcgtgttactggccgctggcgttatgttcggcttgaagatcacccgtgaatatgaccgccagttgcaagcagatgggtcatcagatttgactaaaaggggatagatcgtatgaaaaaatttttcaccgtgtttgctcggctagaagttgttttaggattgacgatgttatggatgacgtgggatgtcggcttgcgagcatctggccagatttttggcgccttagttgttttaatcgggattgtgcttttatacgggttgatcatttatgcgttgattggctggttcatggatcctacgcaccgttactggtatgtgctgacactggtgctaactttgctgtacaacgtgttagcctggacctttcccagcgtcatgatccaaacatgggccacatatccatttccgcttatcactttgttaatcggtgtaatgttggtttgggtggctcggcaagaaaaacaataattggttttgctgactcgggtgactgagtcgtttttgattcccagccagaggtatatactgagatcatgttgtactggaggggaattacttggcacgacctgtaaaagaaaaatttgacgttactcgcctgcgatttgtgctactcggactacttgttggtttaatgagcggcactgttgtcagcgcgtttcgctattgtattgaagtagggctgcgctatagtcggctggtatatgggcacttgcgaatagcgccgtttgtctggtggcaatgggcgttgttgatcggtgtcaatcttggtttggcgttaatcgtggcgtggcttctcaagaaagagccctatatttctggctctgggattccgcaagttgaaggccaattggctggtgaattggagatgcactggtggtcgatcctctggcgaaaatttgtcggcggtgttctggcgctggggcctgggttgtttctcggacgggaaggaccgtcgattcagttaggcgcttcagtcgggcaaggtttagctgctgggttcaagctatcaggaactgatcggcgattgttaattgcatccggttccgctgctggcttggcggcggcgtttaatgcacccattgctgggaccttgtttgtcttagaagaggtttatcataatttctcaccgcttgtttggttaacggcattggctggggcaattggatcggattttgtttcactgaatgttttcggacttgttccggtgctgcatttaagctattcgcgtagtttacctgtatcgagttattggcatttaattttgctaggcattcttttgggcttgtttgggtacttataccagcgaatcttgttggtgatgccgcggtggtatcgcaacttgacacatttaccgcggccattacaaggcattgtaccgtttctgctggtgattctggttggctattttgcaccaaacttacttggtggtggcaatggtttgattgtcggttttggccagtatgtgccatctttgcttgtattgatcgcaatttttgttgtacgtttcgttttttcaatgatttcatatggttctggattaccaggtggcatttttctgccgattctttctttgggtgccgtgatcggtgccatttatggcgtcttcatgaatcaactcggcttattgccgcacgtctatatcatgaacttaatcattttttcaatggccggttactttgctggcattggaaaagcaccgtttactgcgattctattggtaacggagatggttggtaatttgacgcatttgatgccgttagcggttctatcgttaactgcttatctcgtggttgatttgcttggcggtgcgccgatctatgaagcgttactcgagcaaatgacaatgccgaaaacagttcaacagcttcatcgacccgaccgactggaaataccggttttcttcggcagtcccttgaatggcaaaatggtccgcgatatgccatggcctaaagaagcattactaatcggaatccggcgtggcgaacaggaagtgattccacatggtgattccttgatccgtgaaggtgatacgttggtgctgttaacggatgcgacccaacgtgctcgggtcaagcggcggattgatgcgctatcggcggcgttggggaaaacgcaccaaaactcatgagcaagttatctgtcaggacgttgacgtgcttttattgtgagttattttacttgctgtgagacggttcaagtagctaaaaaggtggatttcagcaaagatgcctcttttaggtagaatgcgttcgcctttatgttgcttttatgctaaactactagggtgagatttttcgcaagggaggcaacaacttgcaaagtttattgaccacatttcttgtgatcgattcgattttgatcgtgatcgcaacattaatgcaaccaagcaaacaacaagatgcgttaagcgcattgtccggtggggcaacagatcttttcgggaagacgaaatcccgcggcttcgaagctttcatggagaaagtcaccgttgtactaggtgttattttcttcggcctcgcaatcgcgctggtatatctggaagcccattaacgaaagtctcctggtactcaggagactttttttgcagagcgttcattggcccggtttctgggccaggaaacgcgtttcgacagcaactgcggtggaatagctaaccatatgacaaggctgactttatccgccaatagacaagacctacaaccgttttttcaccgcaatatcgagccttttcaccaagagattgaagttccacttgtccacccagccacttgccacaaaggatgaaacccatcatgatctttcgtgaaccgcaaccattcgaatacgagggcactgataccggtgttgttttgctgcatgcctatactggcagcccaaacgacatgaacttcatggggcgggccttgcagcgggctgggtatggcgtgtatgcgccgttgttcacgggacatggtaccattgagccaatggatattctgactaagggcaacccagatatttggtgggcagaggccagcgcggctgtttcgcatatgacagcaaagtatgaccgtgtttttgtttttggattatcactcggcggtattttcgccatgaaagctttggaaatattacccggtgtcacagctggcggcgttttttcatcgccgatcttaccgggcaagcatcatctcgtgccagggtttctgagatacgcacaatatatgaatcgtttggcaggtgtaccggacgaaagtactcagattttgccttacttaccaggccagctggcggcgattgacaatttcgccactggggttgccgccgatctgtatttagttaataagccgatctttatcggccaagccggtgctgatgaattagttgatgggcagctggcctatcagctacgggatgcactcatcaatgcaccgcaagtagatttccattggtatgacaatgccaaacatgtgatcaccgtgaattcggcgcatcacgcactacaacaagacgttatcgcatttatgcaacaagaaaacgagggatagcatgaccacagttggccatattcgtaatgaacttttagcaacatttcgtaaaaatccgaagattgattattcggtccagacgctgagtcgtgccttgaaattaaacgaaggcactgattttaaaacgctggttcaagccttaactggtatggaaaatgacaatttaatccatcccattagtgaaggccgttatgcttggggcggcacgcctaaagtgttgacaggtattttccatggcaatgaaaaagggtttggtttcgttgcgattgaagatcaggacaatgatgtttatgtgccgtcaacgagcactgattttgctttggacggtgataccgttgaagtccgtatcgtccgtgaagcacgcccaaacgatacgcgtggaccagaaggcgaaatcactaaggttgttgaacgcagcctaacgacacttgtaggcgaattcaaaccattttccgacaaagatcgggccaagtctggttttattggtatggttgtcagccacgagaagaaactgaagaattttccggtttatgtcaaagacactggtaccatgccgcaattaggcgacatgacggttaccgagattacggaatttcctaatgaacaccatccgaagctgatgtatggcatggtggttgaaacattgggaaataagaatgatcccggtgtggatattatgtcattagtgatgcaaaaccatatcaagactgagtttcctgatgaggtaatgactcaaactaatgatatcccggatcatgtcaccccagaagaacgggtgaaccgtaaagatatcaccgatcaagccgttgtgacgattgacggcgacgacagtaaagacttcgatgatgccgttgtcgtttggaaattgccaaacggaaacttccatcttggtgtgcatattgcagacgtgtcgcactatgttacagaaggctcagcgttggacaaagaagcgtttgatcgcgggactagtacgtatctggtcgaccgtgtcattccgatgctgccattccggctgtctaatggcatttgttcgttgaatcctggcgttgatcgcttggcgatgtcttgtgatatggaaattgatcaagatggtcacgtggttaatcacgagatttatcaaagcatcatcaagagccatgcgcggatgacttataacaacgtcaacaagattgtgaccgaccatgacccagaagtgatggccgagtatcaggaacttgtgccgatgtttgaagacatggttcaactgcatcaaattctttacaagatgcggcatgctcgaggtgccattgacttcgaagaaaacgaagccaagatcattgttgatgatatgggtcacccaacagacattgttctgcgtgagcgtggtgtgtcagaacgaatgattgaatccttcatgctggccgctaacgaaaccgtcgctgaacattacaacaagcaacatttaccattcttataccgggttcacgaaacaccagatgccgaccgcattaaagaattcatggaattcattgctagttttggtatcaccgtgccgatgaaaaaaggcaaagaaatcaccccaaagcaacttcaggatgttgtgacagatgtcaccggcacgcctgaagaagcaatggtgagcgttaaaatgctgcggagtttaaaacaggctcggtattcaccagatccacttggacattttggcttggcagcaaagtattactgccactttaccagtccaattcggcgttatcctgacttggtcgctcatcgcttgattcgtgattatgcggttgaaggcactggcgacgatatcaaggcaagctggaataagaaattaccagatattgcagctcaggcatccatggcggaacggcggagcattgacgctgagcgtgcagttgacgatcttaagaaagctgaatttatggctgataaggtcggcgaagaatttgatgctgttgttagtggcgtgacgagctttgggatgtttgtggctttgccgaacaccgtagaagggcttgttcatatcacgcggatgaccgatgattattattcattcatcgatagtcagatggctttagttggcgaacgcaccaagcgcacgtaccgaattggccagtctttgcgagttaaacttgataatgttgatattgatcaacgacaggtagacttttcattgattcctgatgaaaatacgccaacaagtgatctgggcaagttcgtcaaaaaagaagaccggcgtgaacgtcggccaaatggcaacaagcctggttttggcaataataaccatggtgggccaaatcgtaatcaacacaacaatcgaccacgcaaaccagctggtgcgccacatcaaggcaagcactataatgccaagcgcggcactaaataacgctgggaacttttgaaagggggatggttcaatggcgaagaaacatcgacaaaaacctgacaacctgctcgcccagaataaaaaggccggtcatgattacaacattcttgatacctacgaagccggtattgcgctgacaggtaccgaaatcaaatccgtgcgtgatggcaaacttaatttacgtgacggttttgcccgaattcggaataatgaggcgtggttagaaaacgtccacattagtccgtataaagagggcaatttattcaacgttgacccaatgcgtaatcgcaagctgctcttgcacaaacgagaaattcgcaagttaggtcaaataacagcgcgccaaggtgtcacgcttgtgccgttgcggatgtatctaaaacacggctatgccaaggttctgattggtgtggctgaagggaagcataactacgacaaacgtgaaaccttaaagcgcaaggatcaggaacgcgaggttcagcgcgctttgaaggcacggtattaaacgcccagtggcattaagctaatgctgatctgagcatcaaaaatcgatcttctagcttgtccatcagcaatatcatgatgtcgctgatgtgcaggttaggtgacgttatgccaactgagttttatcagtaaagagcatcgggagaaacccgatgctctttttgttttgctatcatttatttctaaacaagctaaagtgttgatgttatataaataattacactattgattgactaatgatttctttttcattgttttgcttatttatttatataaaatggcgatttttccttctaaggttttacttaagtaagaactaatataaaatagggcaaggagactgtcgttggtcaatgcctttgtcgacgaacttcagttgaggagggaggatagcatttgtggtcacactgtctgatgtcgcgaaagaagccaatgtttcaaaaatgaccgtgtcccgtgtcatcaatcatcctgagcaagtgacgcctgagttaaaacaactcgtcgaacaagcaatggcgattttgcattatcgacctaactctgcagcgaaggctttggccaataatcggactaacgttatcaagtttttgattcttgaagatgtggatacgaccgaaccttattacatgacgttgctattcggcattgcccgaggacttgatcgtcagcagtatgctttgcaattagtgacagattgcgagcatcttgatttggatcacgccgatgggtacattattacgggtgcgcggtcgactgattgtcaatggattgatcagttagcgaaaccggttgttttatttggggaaaatcgtcatggttatgattttattgatacggacaataaattaggcgaacagcaagcaaccgaatatgcgctggccaagaattatcaatcgattatttttcttggtattgatgtgagagaaccgtttgaatattcgcgtgaagcagggtatatcaatactttgcagagacatcaaaaagtaccgcagattcatcgaatgggtaatcatagtcacgaatcgcaacattttatcagtgaaaattggcgaaagttcgcgcgaaatactgttttcatctgtgcaagtgatcgcctcgcgttaggtgcggtcagagcgattcaacaaaatggtgggcgaattccaaccgactttggcgtcatcggatttgatggcgtttttctggatcaagtttcaaatccaaaattaaccaccgtgaaacaaccggtggtgcaacttggtgaactattagcacggatgctcttgcaaaaaatcgcccagtcaggcgcacaacaaggtgaactactggtgccgccaaaattagtgctgcgcgggacgatacgcacttaggtgattatagaattccgatctggcaaaatgagtttgtctactgataggtcggggtaacattcacagttatcaaacaggccaacaattttccgctgggaaattgttggcttttcttcacttcattttgataacggtaacaaacgcagttaacttgtatcatgcgtgcgctttcactatgctagttggaaaagggggcgggtcacatgagcacttggtatgatcaggcgattatttatcaaatttatccgaagtcatttcaggacagtgatggcgacggtattggggatcttaacggcattcggcaacgcataccgtatctgcaggacttaggcatcaacgccgtttggctgaatcctgtgtttgtatcaccgcaagtcgataatgggtatgatgtcgccaactattacgcgattgatgagcgaatgggaacgatggccgatatgcaggctttgattcatgaacttcatgaagcgggtatccgtatcatcctggattttgttttgaaccacacatcagatcagcacccgtggtttcaagatgcaagccggaatgtaaaaagtatttatcgtgattattatattttttctggacatcatcataaaagaccaaataattggggaagcttcttcggcggctcggtttggtcgcctgatccagccggtaccggtcaatcctatttccatttatttgatcagcacatgccggatttgaattgggccaatgccgaggttcggcgtgcgatgggggatgttgctgaattttggctaaacaagggaattgatgggttgcggcttgacgcgtttattcatattgccaaagttgatctggcgcaaaactatccaacgtcggaaagccaacaagagcctgtgattgcagaaccgttttttgctaatctgcccaatgttcagcggtggttgcggcccttctgtgctcagatcaaggcagattttccaaatacctttatacttggggaagcggcaagtgcaaatgtcaatcttgctgttgactacacgagccagcataacaaattgatggatagtgtgattactttccgatattttaccgaagatacaacgcaacttgacaccagcatcccagcgcagtatcagccgaaacctttggattttgcaaagtttaaacagacacaggttgtttggcagcaaacacttgctggtgtgtcgttgccgacgctttattggggcaatcatgatatggctcgtctggctacgcgcgttgcccattcagcgattcaggcgagaagtctggcagtgctgatgtatttacaacgcggtattccaatcatctattatggtgaagagctagggcttgaaaatctcacgttgcctgatgcgaaagctttttccgagccaaggtcccgcgtttcattgcagcagctgtggatgcagggtatacccaggaggcggcgttagcgatggtcaatgcgacccataagttgccagcgagagggccgatgacgtgggatgcgacaaccaatagtggctttacgagcggcacgccttggttggttggcaggcgcagcagtcgcacgcatgttgccgaacaacaacatgatccgcacagcagccttgcattttacaagcaattgattgctttaaagaaacggtcggtctttcaaacaggcagttttcgactgttgagcacggggccagacagctatgtgtatcttcgccagacagacaaggcgattgccgttgtggcggttgctttgagtgataaaacagtcaaccttagattgccagccggtgactatcaagcggtgctaatcgttggtgacgcgacactgagcgaagaaacactgacactatcagccgattcagcagcagtattcattcaggaaaaggagcgtgctaagccatgaatttagcagctatgtctcatcgaccagaaagtgaagattgtttcttatataccaataaaaagctacgtttgcggttccatacggcacaaaacgatgtcgccaaggtggttgttttgtatggtgatccttactggcaagagcttgatcagcatcaacaatatcggttgagttatcagcgcaaaccgatgagtcagctagggacaggtcaagttgctgatcattggggagtgaccttggaggcgccttatcaacgtctgcagtacctgtttgaagtgaccgggcaggacggtagcaaatggttatttggtgatcggggattgcgaaaagacacagagtccgcgcgaattgataccggcaattattttcgtgtgccgtattttcacgagattgatcgggtgaaaacgcctgattgggtgaaagaaaccgtttggtaccaaatttttccggaaagatttgccaacggtgatagcacaaatgatcctgttggcacgaaaccttggcgaccgtctgatcatcctggacgtgatgattactatggtggtgatttacagggggtcttggatcacttagatgatttgcaagcattgggtgtcaatggtctgtacttttgtcctatctttaccgcgagttcaaaccataaatatgacaccattgattatttaacgattgatccggatttcggtgataagacactgtttgccaagttggttaatgaagcccataaacgcgggatgcgcgtcatgctggatgccgtgtttaaccacatgggctttgctagcatgcagtggcaggatgtcttagcaaatggcaaaaaatcacgctttgcttcgtggttccacattcatgattatccattgacgccatttcataatcccctgaaaggcgagggagcgccacaatacgatacatttgcgtttgagtcgcgaatgccaaagttagatacggccaatccagcggttcaggattatctactgcaagtggcaacttactggattcaagcatttgatattgatgcctggcgtttagatgtggcgaacgaagttgatcatcatttttggaaaagattttacagcgctgtcaccgccattaaaccggatttttatattttgggcgaggtttggcatagcagtcaaccttggttaaatggcgatgaattttccggtgttatgaattatgccttcacgcagcaaatagaggaccactttttgaccggtaagcagacagctgcggggatgaccgctttgttaacggaccaattgatgctttaccgcgatcagacgaatcaagtgatgttaaatatgttagattcgcacgatacaccgcggttgttaacggtagcaggtgatgacattgagctagcgttgcaagcattgacctttgcttttcttcagacaggtacgccatgtctttattatggaactgagatgggcatggatggggaaaatgatcctgatgatcgaaaaccaatggattggacaaaattaggtcagccaatttggcaacgggtggcgaagctcatcggctttcgtcgtgaacatgcggctatccttgggcgtggtacgaccaaattagaagtgacaccttctggattaattaaggttgtgcgccacggccgtgaaacgctgacggcatatttcaataccacagcgtcatcggttcctttgacggcggcacctgttttgcatcaagggtttgctcaaaatgagttagctccaaaaggatttgttgtagcagtaagctaattatgatagcggtaacattcattttacgattgtatagcgctttcattcatttataataaagcgtgtcctttaagtggttgttgccatgactatcgtaaagaaaacggtcacaagggagaagtggagaagatgaaaagaacatttgcagtcgatccgtggatgattgcaacccatcagtttcatccagaggacaagcggcttcaagaaagtttgacggcaattggtaacggctacatgggcatgcgcgggaattttgaggaacagtactcgggggatcagctttcgggaacttatctcggtggtgtttggtttccggataaaacccgcgttggttggtggaaaaatggctatcctgcgtactttggcaaagcaatcaatgcacccagctttttaccaattcgcatcaaagtgaatgaacaaccggttgatttggccaaaaacagttttcgggatttctatctggcacttgatttacatcagggattattaactcggcagtttatctatgaaggggatcaggttgaggttcggtttgagtttcaacgatttttgagcaatgtggtgaaggaagcagccttgattaacgtgaaagcaactgtgcttagcggtaaggcaacgatcacatttgatgctggacttgaaggtcgtgtcgctaatgaagatagcaactatgatgagcgattttgggaaccgcaagctgaggatcccactcaaaaaaccattcaattgcaaaccaagccaaatccttacgatgtaccgccattcaccgttctattgaagcaacagttgcgtgtcaatcgtcaaccggtcacaggcgttgtcacgactggcaacggctggctaaacgaacaaattgtggctgatgtggcaactggcgaaacttatcaactggaaaaggatgtcattgtggttactagccgcgatgttgcgccttctgatcagcagcaaacagccgcagccttgatgaccacattgcaaacacacagtttttccgaacaactggctgctcatacgcagctttgggcgcaacgctgggagcaaagtgatgtggtcattgaaggcgatctggccgcacaacaaggcattcggtttaatattgcgcaattgtttatgacgtactatggcgaagataagcgccttaacattgggcctaaaggttttacaggtgaaaaatacggcggtgccacttactgggatactgaagcttatattgtaccaatgtatctggcagtgacgcccccagatgtgacgcgagcacttcttcaatatcgccacgatcaattacctggtgcgtatcataatgcacagcagcaaggactggccggtgctttgttcccaatggtgacctttaatggcatcgagtgtcataacgagtgggagatcacatttgaagaaatccatcgtaatggtgcagttgcgttcgcgatttatcaatacacggcttataccggcgatgaaagttatgtcaaccgtgatggtattgaggtcttggtggggattgcccgtttctgggctgaccgggtgcattttagcaaacgtgccaatcagtatatgattcacggggtaaccggtcctaatgaatatgaaaacaatgttaacaacaactggtataccaacaccatggcatcgtggacgttaagttacacgttagcgcgcctgcccaaggcgaatgccgacgtggtcgctaaacttgcggtgactgcagaagaaaaagctaagtggcaagatattattgatcggatgtactatcccgttgacgatgaattagggatctttgttcaacacgatacctttcttgataaagatttgcgacccgccagttcgattcctgctgaccagcggccgattaaccaacattggtcatgggatcggatcttaaggtcgccttttatcaaacaggctgacgtcttgcagggcatttattttctcaatgaccgcttcacccaagcacaaaaagaacgcaattttgatttctatgagccgatgacggttcacgagagttcattaagtgcgtccatccatgccatcctagcagctgaattagggaaaacggaaaaggccgtggcgttatatgcgcgaacttcgcgtctagatctggacaattataataacgacactgatgacgggcttcacattacgtccatgagcggcagttggttatcaatcgtccaaggctttgcggggatgcgctatgatcacgaccggttacgattcaagccatttttgccaaaagaatggcaccgcttcagctttaaaatcaattatcgtggccgtttgctggcagtggacgtgagtgaggaggtcaacgtgatcttgttagtcggcccgtcaattgatattgaagtgaatggtgagctgcagcacttggaaaagggggatgaccatgcttaaaggcttcatttttgatcttgacggggtggtcaccgattcagctaagtatcatttagccgcctggggggagttggcaaaacaattagagattaccctgccagctacggcaaatgaggctttacgtggccgttcccgaatggactcgttagcgatcatcctcggttacggtgatcaacagaagcaatataccgaagttgagaaagaaaacttagcagatgaaaaaaatcgacgttatcttcaattgattgccaatatgacgccagccgatattctgccgggtatcagtcaacttttatcggacgccaaggcaaggtatttaaaattggcaatcgcatctgcttcaaaaaatgcaccgactattttgcgtcaattgaagttatttgatcaatttgatgcgattgttgatccagctagtctgcatcgcgggaagccagatcctgaaattttcatcaaagcgcagaacttgttgcaattgcaagcagatgaagtggtgagttttgaagatgcatctgctggtattgcagcaattaatgctgctggtcagttttcggtgggcatcggcgatgccaaggcgctcgcagctgctgattatttcgtggcaaacacaggcttattgcgactcaaatcaatcacgacagccttcacaaaatggcaaaacgcgttgaataagaaaggagatggatgatgtcatggttgagattgatttgaaccatctttataagaagtacccgaatgccgcacaagattctgtcaaagatttcgatctgcacattaagaataaggagttcattgtctttgtcgggctgtctggctgcggctgatattcttggcctgacagagtttttggcccataaaccagcagacttgtctgacagccagcggtaacgggtggcattagggcgagctatggtcagagatgcaccgacttttctaattgatgagcgctttccaatctggcgtacaattgctccggctcggcactatgatctttaagtgatatcaggttaagtataagaaatgaaagagaaatggttttcaagttttgttaaaaatcatttctctttattttgtaaatataaatgcctctgaaatctctttttgtgtcttgaaaagtcaaaatgttttgacacttaaagagttggtattatactgaaggtgtcaaaagagtttgacattaaaggggcgattatcatgaagaaaatggatgagatggagcttaaattcagagatcaatcgattagatactcttgggctttcatgattttcacattattcatttacgaatttttccacgtgatgcattatggaaaatttgattttatttctgttgtggtaaacgttgcagtgggtgtccagattgctagttttttgtggcttaaacatcgagcagataagactgataaagaaccgggaagggtgttaattggcacgattgtcattgttgctgttgtgctaaccttaggcatgattggattgatgttccatggaaaataatatccacgtactcagaatgcgccaacaattaacccagcaagaactggctgacgcagtgaatgtaacccggcaaacgattaatgccatcgagaataataaatacgacccaacactctccttagccttcgcacttgcagaacgcttggagacgactgtggatcaactgtttcaacattagagaagctgaaaattatttaaggctacaaaaagaagagtgactttttccgatcaccgcatgtatgcggcggaaaagtcactcttctttcgttttactgtagatcaaaggtcatagtttaaagattccagtgccaaggcggagcaatcggaggccagatggggctcagccgtgcaaacaacacagcgaagggcttttgagctgatgttgttaggcgacttcgagaccggtttttgggctcgaagcgccgtcaccgcgttccagccccatctggccggagattgcggagtttggcacggcaggagtcgtttttgtctgacgcttgtgccaaatcatcccgcatctaacaaatcataagttctagatagaaactgaagaagcaactactgctgacgattactcctcttcatttaactcatcaaaatcatagtacaaatctctttcaggaagcaccacagcggcatttgtttgggtatccaaggcttcggcttcgcgttccggatggaagctatgccatggcacaatggttcgaggattgacttctttcgccaaagtaattaaatcctcacggctagcatgacccgaggcattcatgaactgcaaggggatgtgatgcgcttctagccagtctttgagttgcgcaaaccgcgggtcgtaatcgcctagtggctcgccgttactgtggatgtaggtcgtgatgggcatgtcagtcagtcgttccagatggtcaaaactattttgcaggacatagtgttggggatcacgggcaatgtccgtcagactgattgtttgaccaagaatagcatcgggtttttgatcggtcatggtggtcagcacagccgcgtcatcaggttcccacaccaattgacggccggcagtgtgtgcactggcctgaaaacccgccagacgctcgtaattgcggatgtaaggattgatgacgacaagcgtcgggctttccgccagcactgtctgaaattgcttctgcaggctcatttcggtcaatgggatgctggggtgatcctgatcttcaacaggggcagctgtgtcaaaagagaagctggtgccttccaacataaacaagcttagcttttcttggttaaatcgcttggcccaggcatgaacccgttcagcatgcgggccatttaaccggacatcaccggaatgggcatagcgtcgtgagccgtcatcgactaggagcgccatgacgcccggctcgtcgtgatcactgtggaagcctgttacggtgaggtcaccaatggttatgggctgttcataggcaaggggatgcagatttgcaactggcttttcgatgcctagtttgattaacagttgatagagcttataggatggttccgaaagataaatcggaatcggtttctttaaatattgcaatgcacccatgtggtcaatgtgcagatgtgagataaagatggcctcatgtgtgtaaacgtctggttgatcaaaaaatagttccggcacatgcggcaatttaccattatcgatggcagagctgactgtttcgttgctgagatcagcagccacgccgaagtccatgataacgcggctggttttagttgcgaattcgacgatgttgccgccgatggtgtttaacccatttaaaaagcgaattgttgtcacagtgttacctccaattgtttcaatatcattttgagaacactaaagcgtaccccgccggctaccgaaaagcaaacaaaaaccgaatcagcacatagctgattcggcaaagatcaaggcggagcaaacaattacttgtttgtcttgatgatggtttcagtttgaccctgaagtgtcttcaaagcctgatctggtttttcatgcttagtcagcatcgcatcaaccgcattaagaagatcgttacgatattctgagaagccgatgaaagcggtggactggaagccaaagcccaaagaatcaactgcagcttggctagttgggttagcactcagatatttcttaaagtcagcagatttaacagcggacttacgcagtggcacataaccagtcaattgggcccacttggaagtttccttctcagaaagcaggtacttcatgaatgcccaagcgcctttttgcttatcgctagatgcggacttgaagaggacgatatcattaccggcaagttcggttgcctttttgcctttgtagcttggtagcggcattgtgccccacttgaagtctttcggtgcattttgcttcatgttggtgatcccagcacttgaaccggcataaaagagtgttttaccagcggtgaagttcttatcgccgtaaatgtcttcgccggcagtcttggcttcgccgctgttaaccatgtccataatgaagttagcagcagttaaggttttcttgctatccaagttagctttcagcgggtcagctgaaactaacggattgccagcctgacgtgccagaccttcaaattccatatcaaaactcttatcgaaaccaatagcggcaataccgtctgccttcagtttatcggcatcttttttgatgtcttcccagctggttggcttggcaatattgtatttcttcatcagtgcttcattgtagaaaagaatacgtgtggacttggagaatggcacgctgtaatacttgccttgatacttggagctggacaagaaggctgggtagatgtccttcaagtcgctgctgctcatcttgtcgtcgcctttgagcatgtattgatcaagcggggaaataaaaccatttttcacgtagtcaggaacagtggtgtaagttgtttgggcaatggttggcaggttgcgagattttgctgcagccatgatcttttgttgcaaggcggtgtagttaccttgcgcggtgccgacaactttatactgtttctgactcttattgaaatcattgatgatttgatcaagagccttttggtaaggaccgttcatgccgtgccaaaaagtgatcgtcacccgtttgcccgaatcactcttggtgcttgaactcgatttgctgctgctgttactgccgcaagccgtcaaaacagcgacaagaacgacggtgaacattgcaagtaatgcttttacccaagtttgctttttcattttggtagattatcctttcaatccagctttagaaatcccagcaataatgtacttctgcaagaagatatacaaaacaaccattggaatgatgacgaatgtggaagcggccatcagaagttgatattgcgtgccggcatcggtcgtgaaggcctgcaagccgactggcaaggtacgcatcttgtcagagttcgtaacgatcaatggccacatgaaggcattccatgagccaatcacctgaagaacggtgaccgcggtaatcgttgacttgctcattgggacaagcacttgccacaaatatttccaatcggacgcaccgtcgattttagcagcgtagtagatctgattcggtgttgattggaaagtctgacgcaaggtaaaaacggtgaagaagctggccaaccacggcagaatcaaagcgccgtaatggtcaatttgccctaagtgtgacaaggtcacgaagttagggatgattaacatttcacctggaatcatcatggttccgaggaaaataatgaacaagaggttcttgccgtaaaacttcaatcgagcgaaagcaaaagcggcaagaatactggtaaagagctgcccgaccgttgtgataacagtgacgatcgtgctattaatgaaatactgtccaaacggtgcttcgttccacgccttgacgtagttaccccattgtagaaccttagggatccagatcggtggaacggcaatcgtttccggtgccgttttaagtgatgtggagatcatccataagaaggggatcagcatggtgatcgcgcctaaaatgacaatcaggtaaagcagaattttactgatttttttagccatgtttttgcctcctccttagtaatgaacgtgcttgcgggaataccacaactgcacgagtgtcactagcaggatgaggaagaaaagcacaaccccagacgcagcagcaattggatacttgtactcggtataaaatttctggtacagatagtaaacaattgtcaaatcagctttacctggtccgggcgtgccttggaacaaggcgaagatttcatcgaacaccttgaagctgccgatgatcccgttaactgaaaccaagaaagtgattggtgatagcatcgggatcgtgatgttccaaaatcgctgacgcgcgttggcgccatcgatttcagcggcttcgtaatacccgtggtcaatgttgttgagaccgaccaagaaaagaatgatgttgaagcccagacttttccaaatactcataatgatcagcgccagcagtgcataatgcggatcagtcagccagttaatgggatggataccaaaccagcccataaagtagttgatcagcccatagttactgtggaacatccaattccaaaccatcgcaatcgccacagtactggtgacaaacggaaggaaatagacggttctgaagaaaccggagatgatcttcacctggtttagcaataaggcaatgatcaaggataaaatgacagtgatcggaaccacgccgacaacaaaaaccagcgtattccgcacagccaagtgaaaatcaggatcattccaaagataaacaaagttatcaaagccccaagcactgaccttatcagtataaaaatcatacttcgtgtacaaactcatcagaaatgagttaataatcggccagatattgaaggtgatggtaatcaccagcattggcagcaaatacagcgctgctttggcggtcgattttaggcttgctttttcattcagcatgactttcaccaccaaaaatcaaggcgccggattggtcaaaaagaaagaaacccgacttggtgagatagaaatccagatctggttgattagctgcgacaccagccatttctgttgacaacaggtgctcgccgttataagtaatatcggctgtagcttcccgcccatatttagaactttgcgtgatcttgccatgaagcttggctaggacattgtcgccggcatcataagggatgatggcttcactacggatccctgcggtgactgcctgcttcaaaatatcttctgacacagcgctagctagatcagttgtcaacgcttgtgctggcaaggtgttgatcacaggctcaccgataaacttagcaacgaacaaattgttcggtcgctcgtatagtttttggggggaactgaactgttgtatcgaaccatttgccaaaaccatgatgttatcagaaatgtgcaatgcttcatcttggtcatgggtcacgaaaatcgtggtaacaccggtttcgcgttgaattcggcgaatttcttcgcgcatctcaattcgaagccgggcgtcaaggtttgacaacggttcatctagcaacaataggctaggggacttggctaaggcacgtgcgatagcgacacgctgttgctggccgccagaaagtgcccctggtttcttatcaagctgatcctcaacatgaaccagtttggcaagatccttggctttggcgtgccgttcagccttgctgaccttggccattttcagtggaaaggcgatattgtccaacactgacaaatgcggatacagactgtagttctgaaataccatcccaactttacgcgctaaggcatcttttttagtcacatctgtatcaccaaaaaagatttgcccagcggttggggacaacaatccggaaatgagatttagggtcgtggttttaccgccgccggaaggacccagcagggaaaccagcgtgccatcgggaatggtaaagttcagatctttcagggtatctgtcttgccatcgtaggacatcgtgacgtccttgaaagtaactttcaacccagtacgctccttcaaatagttttctgctcctcacctccgttcgtcggtctccagcaacaaaggctgtaagaacgcgcaaagagaaaatttggaacaagatattgtggttgcttcaccatgattagctacatctagagaaggcaaacacaactcttctcacattttaacccagattcactgaaaaatggactcattcgcccaaaaacattttgattatgtttaattgccatcacaacgcgaatgttcgccttttttgctataatagaaagcatgcaaaaggcgcaacttgaaccaactgctttcgctgctgatgagtgtcagcaaattggcggttcattcagcgccaataaaagaggagcgatttttttgataatacgtccaagcaaaccggacgatgcgccgcaagtagcaccgttgatcgatattgtgtttacggagatggaaattcctcagttaatgaaggttcctaagaagaccctgtattcggttttggaacaagcctttttactgccaacttaccggtacggttacccgcaaatgttggtggctgatcaggacggtcagattgaagggattgctgttggctatttgcatgagcaggaagcccatatcgacgatgctttaaaaccgttgttgcctaagctgggattgaccccaaattcatcgcttttttcagacaccgaaacttatgccggcgagtggtatttagatacgctagcagtcgccgagacagcgcagggacatgggatcggaaccaaattattaaacgcagtcgatacggttgcccgggctcggcacgctaaagtggttagtctgaacgtggatcagcagaatccgcgggctaaaaagttatatgagcgcaatggttttcttaaacacggcgagttgatgattggcagtcatcgatatgatcatatgctgcggccggttgtaggcgaggaagtttaatgttagtcaataggttagcctaaagcccttagcccgccgaacgccgcaatctccgaccagatggggtttgcgacgcacagccagagtggagacggcacttcgagtcccaaaaccggtctcgaagttgcctaatcacatcggctccaaggtcaggttgtacggctgaacgccatctggtctacgattgctccgccttggcactaggatctctaaatagcaatgagaaataaagacgactggtattccatggaggaaaatcagtcgtctttatttcatagctaggaatgatggtcttagcttttcttttcgtttaatctgggaaatccagcccatattcataacgcttcaatggatcggccacacccacatggcgaaagcggtcgaggatagcagctaacaaaatggccgctggaatgtcgcggttattgggaatggtcaacttaacgattgctggtgcaatttcttcagcactgaagatcgttttgaccccatgaaacacttgataatggttattcaaaagattacccatggcgacccagttgagatctgagataaagatgaactgatgccagaccccaaacatttttttgacgctggcaaccttgcgattggcgatataaagatcatagcgcgggaaaacgctgaccgttttttgtcgaatggatccaagcggttcgccgcttaatgtattcagatcgaagccaccattaatcagtccgtgccgaccagttagaatgtaggccggcttgccgttatcggttttgaccacacttaaactactcgtgcttaaagcattgatatcaagatataacgccatcggccaacctcccttatggtgagcgtgaactggcgcggttagaaaccggagcataagcgggctcaagtgcgatgggcgggttttgcccattgtgcttaaggcccttatgagcaggtttctgcgtcagtgagcgcgttatggtgagcgtgaaccggcgcggcgctcgtgtttaaaaaattaaaatcagcaaactatcgctgcgccaatgattattagaattgagcgtttgatttttccgccttattaatgcgaatggctttgcgaattgcctgagcaacgccgttttcgctattagtggcagtactgccccatgcgagcttggtgatttcggggatggcgtttcccatcgccatgccatatttggccattttgatcatgctggcgtcattcaagttatcgccgattgtcatgacctcatccatggtaataccgcgttgcttagcgaaagcttcaacagcataacctttttgcgctttgatgttgttgacctcaatgttattcgcggagcttgaggtgacacttaatttaccggtggcatcaaaaaccttcgctggtgctttcaaaatatcgcgttgctcgccagtaaacgcaatgattttcatcacttggatagtagggtcggctagcagttctttatagtcactaacgtaattgatgttcatgatttccagccgtgcagctgcgagcgcaaccgccagtttgtaggttgtatctgggttgagatcaaccaatagatcggcaacattttgaatacgtttgacgcggctgtccgaaaagacgcctttgttggtgatgatttcaaaatagatgtcgtccttttgcaaggtctcgacaatgaaatcgcttaggtcactagcaattggaatcgtgaccaccaattcgccagcctcatcaaaaaccatggcgccgttgagtgtaatgaatgctggtttgagatcttgggcggcaagtaacggtgtagcttcggtgacgccgcggccagttgcgaccataaattcgataccagcggcttgcgcgtcacgaatggcttgggcgttttcgtccgaaacttccattttgtcgtttaaaagtgtgccatccatgtctgatgcgataagtttgatcatatttactgttccctccggtttgtcatggtgcggttacgcctccaattctagcatgaaaaagcgtttcccggtagcaaacccgcggtgattcttgtacactatttgcggaggtgcacgtcttgaaaacattaatacataatgactggcagacggtgctggaaccggtatttgaaagtcctgagtatgctcaactgcatgcgttcttaaaagaagaatacgcgacaaaaacgatttaccctgaaatgcaccatatttttcaggcattcgaatggacacctttccatgatgtgaaggtggtcattctaggccaggacccttaccacaatccgcggcaggcggttggtgcgagctttgcggtggcacccggtgtcgctttgccgccgtctctgcaaaacatttataaagagttgcaaagcgatttaggctatccaccggtccatcatggttatttgaaggcgtgggcggaccaaggcgttctattgttgaatgccgttttgacggtacaagccggcgaagcctattcccatcagaatcatggctgggaagagttgacagatgctgccattgctgccttgtctgcacgcggcggcgttgtgttcatcctgtgggggaacgcggccaaaaaaaaggcggccgtgattgatacgagcaagaacgcgattattgcatcagcgcacccaagcccgttatctgcatctcgtggcttctttggcagtcgcccgttttcgcgcaccaatgcggcactagaaaaaatgggcgaggccccgattaattggcagttaccagaaacggtgaaggcggattaacctgaattgactagccttaagtggctcagacacactgtttttccattgtcttcgactagtcacgacccgataaaaacggtatgatgaacaagaataaagcgcttttatggagggataagatttggacctatttgaaagtttaaaagacaagattaatggcaaaaatttacggattgtatttccggagggcgaagatccgcgcgttttgggcgcagcagttcggctcgcagctgacgggttgatacaggccatcgtgctaggtaatcctgataagattcagacattggcagctgctaaaagctgggatctcagcaagttgacagttcacgatccagccaacgatgacattcacgctaaaatggttgcggccttcgttgagcgtcgcaaaggcaaggcaaccccagaacaggccgaaaaaattgttcaggatgccaattattttggtacgatgctggtttacatgaaggaagcagacggtatggtttcaggcgcagttcattcaacggctgacacagtccggcctgctttgcaaattatcaagacgcgtcctggcgtgcatttggtcagtggtgcgttcattatgcagcgtggccgtgacgaacgctacttattcgcggataacgccatcaacattgatccagatgctgatcagctggctgaaattgcggttgagtcagctaaaaccgctgccttgtttgatatcgaaccaccgcgcgtcgccttgctgtcattctcaaccaaaggcagtgctaagggactgcaagtagataaggtagttgaagccactaagaaagctcatgaactggcacctgatttggccttagatggtgagttacaatttgatgctgcttttgtcccaagcgttgccaagcaaaaagcccctgattccaaagtggctggggaagcgaatgttttcattttccctgaattacaatccggtaatattggttataagattgcgcaacgattcggcgggtttgaagccattggcccaattttgcaaggtttgaatcagccagtttctgatttgagtcgtggggcaaatgaagaggatgtctataagttggccattattacagcggcccagaccttgctatgacaagtttgaaaaaagacttcactagtgaggcagccctgcaatcctttgcggcttcactgggaccgcagttgcaagcgggagacgttttgctgctggatggtgacttgggtgctggtaaaactagtttcaccaagggcttggcaaagggcttaggcatcaccgattacgtcaaaagtccaacatttacaattgttcgcgagtatcgtcatggccgattaccgctgtatcatatggatctgtatcgcttagaagacggtggggccgaggatctcggtcttgaagagtacttcgaaggtgatggggtgtctgtcgtggaatggccggattttttgggattaagtgaaccagagacctatctgatgattcattttcaaaaagatgacaatgaagatacaacgcggcatctcgaatttgtgccgtttggccaacactatgagaatttactcgaaagcctatgatagcaagcacgcaaagaacatttgcgtgcttttttgatttggtttggtaaagtggtgcagaacaaagaaaaggcggtgcgttatgaaatttggcgaacagttggccgctttgtttgttgggcttttcgttggcgaagtcacaatctgggcagttatccacacttttcgaagacaatggcgtgcatgagggtcacagaatttggtctggctactttcactaggacaataaatctacttttgataacacgttatactttgataaccaaagtatgcatggtagactattgacaacgtgagaaagtgagctaattcataacgtgaacaggcacgttggcaagctgagatattggtcttaggcgtgatgaccagttgtttgtcattgcttctgaggctcttaccatagaggcttgagcatctgtgagcgcgttttaagtaaaggagtagtggccatgctagaagtcaaggatcttgtgaagaccttcggcacgatgacggcggtcgatcaggagagcttcaccgttaaaccaggtgaaatcatggggttgatcggccaaaacggggcggggaagacgacaacatttcggatgattttgaattttttgacaccagactctggtgccatcacttggaatggtcatccgttaacagctaaagattatgacaccattggatatttaccagaagagcgcggtttatatccaaagatgcgggttcaagatcaaattatttattttgcgcgcttgcgtggtatgcgcacgtcagaaattaaagccaagattccagaatggatggaccgatttcaggttaaaggcaagcctaccgataaaatcaaagacttaagtaaggggaatcagcaaaaagttcaggtcattgccacaatgattcatatgccaaagctggttattctagatgagcctttttcgggacttgatccggttaactcaagcctgttgatggctggcattcagatgctgaaagataatggcgctgcgattatctattccagccatgatatggctaacgttgaggctgtttccgatcatctggtgatgctgaaacagggacggatggtcttaaacggagcggttggtgagattcgcgaaagttttggtcggaccaaactattcattgagtcagggttgactgccgatgacttgcgtgaatttgacggggtaacgaaaatcaagcagcatggtcaagaatttgagttgaccttagccgatccggcagttggtcaccagatttttgctaaagcaacggaaaatggctacataccagagttccgtcaacaaccaccgacacttgatgaaatcttccgtttgaaagcaggtgaagctgatgcataagttttgggtggttatgagtcaggtctataagaaaaatgccagaagtggttcatggatttttctagtattgtcaccgctatttttccttgcgattgcttttggaattgttttttatatttccaaaacgcaagcacctgctcaggtcgcagttgtcagtgacgttggcgttgtgcgccaagcattgagtaaacaaagtaccagtgatttacgctttaagccgtatacttctgctaaaaaagccaatgatgcactgaacaaagaagatcttgatggcattttaacggtgaatgccaaagatgacttcaagtcgcattatgttgctcgcgataacggtcagacagttgagacttcaacgctggtggcagcgctgagcggattgaaattgagcagcacggccgcagccatgaagctgacaccagctcaggttaaggctttaacggcaccgccgacagtgacatcgaaaacggttgccattgaggatggcaagcaggtagccaaatccaatacggcacaacttatgaatcatggccttgcgctcgtttcaatggttttgattctgatggtcaccatggtgtatggttctattctggcacaggaaattgcaactgaaaaaggctcgcgaatcatggagatccttttgtcctctgtcagtgccacgacgcaattctttggcaagttggcgggtattttcgccttgttgctgacacaactggttatttacgtgattgccggtgttatcggctggcaatttttgaaaaatcaaacaatggttgccggcttgttaaagcaagtggatctttcgatactagcttctgggacaaccgccatgattgcgcttttctttatcatcggcacactcacttattcggtcttggctgcattaaccggctcgcttgtttctaatcaggaacaagtccagcaagctgttatgccaattaccatgctggggatgatcggctacttcattacaatcgccgcccaagccaatgattcgacgctggcacaagtaacaagctacgtgcctttcttgaatgtttttgttatgccaacgcagatgtcgctaggccgagcaagtatgggtcaggcatgggtcagtgtcggtattagtgtcgtctttctcgccttgtttactttctttacggtcgcggtttatcggaataacgtcttggtctattccggttcgggcttgtggcaatcaatgaagacctcctttagcatttggaaggcggaacgcggtgtggctaaaaaataaatataattaggcaaaataggcaaaataaaaaggcgattcctcagcggagtcgcctttttgcatggcagctgtattcagcagttaatgagcgcgcagtcgggtcaaacgttgagcggttgccagtcgtacctgaatcaacccgcttttgaaagcttcatcatgcttttaatccgcgcttcgccaaagtgctcattttcggcgatcaaaatccgtgcacaggcataactatccgctaaggcattgtggtgatgctcaagcggaatgtgtaaggcggcactgacagtatctaaccgatgattcggcaacttcggcaaaaattgtcgcgaggttttaaccgtgtcaatcacttgatagcgcggcgccgcaatgccgtaacgatccagtgtcagtcgcataaccgaaacatcaaacggtgcattgtgagcggtcacgatccgacctggcgtatagaacatttgaatatgcggccaaacttgatcaaatgttggctgatcttgaaccatttcaggggtgatgccatgaatgtgaatgttttgggcatcaaactgcatctgcggattaataagggtgtaaaaactgtcaaccaccttattttgctggacgaccacgagcgccaatgaacacgctgaggctcgcttgcgattggcggtttcgaaatccatggcgataaagtccatcgtattttctcctaaatcaagtcttttgtgacaagttcaactggacagtggtcactgcccataatgtcggtcagaatttttgcatcctgaatatatggtttaaagtcacggctgctgacaaagtagtcaatacgccaaccagcgttattagcgcgggcatggaatcgataactccaccatgagtaagtgacggtatctggatacaagttccggaatgtatcgataaagccgctatctaactgttttgtaaagtcagcccgttcttcatcggtaaagccggcgttgtggtgattggtcttgtcatttttaaggtcgatttcttggtgcgcgacatttaaatcgccgcagtaaacgagcggctttttggccgcgagttggttcgtgtaggcaagaaaatctttgtcccattgctggcggtaatccagccgcttcagttcaccaccagagttcggcgtataaaccgtcatcaaatagaagtttggatactctaaggtaatgatccggccttcagtatcatgttcaggaacgcccatcccatacgtgacattgagcggttcatgtttggtgaaaatggccgtaccagaatagcctttgcgttcagcgtagttaaagtattgatgatagccaggcagatcaagttcaacttggcctgcctgcattttggtttcctgcaaacagaaccagtcggcgtctaattcattaaaaatagtcataaagtctttttttaaaacagctcgtaagccattcacgttccaagaaattaatttcatcaaatgattcactcctaacgatgcattgcggttccattctactagatttgacagatgattgcgatatgcagagcgcgaacaggcttctgcgcctgagagcgcgttttctacgagaagtcaaaacacagaagtatcattcaattcaatttctaagactgacagtaaagatctagggaaagctcttcacagccttcccgtgttcataacagcaattatctgctaaaatagcttagtagtatttgtgaaaggacctgatgttgtggtggatgcgccgcgtacgcttgaaggaattaccatgatgcatgatgaacctttgagtcattatacgtttacgaaaaccgggggaccggctgatttattggcgtttcccaaaaatgtggccgaagtgcgggcattagttgatgacgctcgtgaccaaggcttgcctttgacggtgattggaaatgccagcaatttaattgtccgggatggtggcattcgcggactggtgttgattttaaccgaaatgaaaaccatcacggccagtggcaatcaagtgacagctgaggcgggggcgcggttgattgatacaaccgaagcagcttaccgagcaggtttgactggtcttgagtttgctgctggcattcctggcagtgttggcggcgctgttttcatgaacgcaggcgcttacgatggtgaagtctgcaacgtcatcagcagtgttgacgttttgacgcgagaaggcgaattaaagacgtatgatcaccgtgaactgaaattccgttatcggcacagtgttgttcaggatacaggtgatgtcgtcttaagcgctacctttacgctcaaagcgggtgacaaaccagtcattcgagcaaaaatggatgagttgaatgcgcgtcgggcggctaaacaaccacttgaatatccttcttgcgggtcggtctttaaacggccaaaggggcattttgttggcccaatgatccaaaaagctggtctgcaaggtcatattatcggtggggcacaggtgtcaaagaaacatgctggcttcatcatcaacctcggcgatgcaaccgcaacggattacctagacatgattcatcttatacaaaaaacagtgaaagctaaatttgatgttgatctggaaaccgaggttcgaattatcggtgaacctagtcaaccaaaatagaccttagaaaggggcgacacaatgcatttagtcgaagccgttttgttcttgatggcacttgtcatcgtctcaaacgtgctcagtcactacattgtggctgtcccggtctccttgattcaagtcgcgctgggattaggcgcggctttgttttttcatttggagatcaatttagcgacagactggttcatgctgttgttcattgctccgctgctattttatgacgggcgtaattttccgcggcgcgagttatgggaactgcgtggcccgattatcggaaacgcaatttttctggtgtttgtcacgatgctggtcggtgggtatctgattcactttttgattccgccgatgccgttgcccgcaagttttgccttggcagcgattctcagcccgactgatccgatcgcggtgcagagtctagctaagcgagttcatctaccaaaaggtgtgctgcatttggtgagcggcgagagcttgatcaacgatgccagcgggctgatcggttttaaatatggcattgcggcgaccatgacaggtacatttgtccttggcaacgccgttcgggatttcttttatgtggcaattgtcggtgccttggctggactggtgttaatcagtttaatcaacctaagtcgcaaatggctgctgcagcaagggattaacgatgtcattttgcatactatcttgcaggtgctaacacctttcttcatctatctcgtggtggacgagttcatgcatgcgtcgggtgtcattgcagtcgttgtggcggggttgcttagtaatactcgctacaaccgttacattgctgccttgccagaacttagaattgtttcggaacgtacttgggacattattgtctatacacttaacgggattatttttctcattctcggcattgaattgccggttgcgatgaccgacacgattgctgatcatgaggtcagcacgtttcaggcgctcggctttgtggttgtcgtttacctgggcattttaattgttcgaacgctatggatttacggttacatgctgctggcaaaacgttccaaagaaggcaaagcttcatggcgagcagctcttttgagtggtatttctggcgtgcgcggcgcgattacattagtcggggtgcttgccgtcccagcagctttgagcaacggtgatgcatttccggagcgtagtttaatgttgttcatcgcggctggtgtggtggtgctaagtttaatcgtcgccattatcgctttgccgttagttacccgttcagtggcaccactgcaaacgcgtggatccacgattgtaactgacgacagtggcgatcaagatgatgatgacagcaacgatattcgtatcatttcgctgagtcaggcacaaacctttgtctttcaaatggcggttcgccgagttgagtcggagcgccgtgagacgaatcaaaaagccgctttggacttgattgcggaatatcagtacctgattcgccggttagaactcgctgaagataccggtgctgccattccaccgctcattcaggatgaactggatctgcgaaaagtcggggttcaaggcgagctatatgctttagacgatctatggcgcgacaacaaaattatgtccaaaagttacgctaaagcccgcaaacaattgcaacaccgcctgaatgatctggactcaatggccaaacgctccggccgaccaactttccgcatgttgttcgaacgttccgccttgcgcttatcgcattggtggtacaccgtggccagcgagcaaaatcgttcgcaccgattcttcaacgagcgcttatttattgaaaaagaaaccgcaaaaggcggacttaaatatttatcgcagtttttacgacaaaaggagaacaaagcccacaattataaccgccaagttatttatgctttgattgtccaatatcgaaatcgaattgcttcggtgaaggctttgaacacgcacaaatcaactcaatatgagcaggaactcgggcgcttgcgagctattgcgtttgcggctgaacgggccgctatccacgatctgacagaaaaagggtatatcacgatgacgatggcgcaaaaactgaatcaaaatgttaatttcactgaaaatgcggctaccttaacgtcacttgaagaggtttaagggccgctgcggacaagtcatgcctgttctaaaagagcgtttggttgggtcaaatcagttggtttttgctttttaaaacagacgttaattgacaacggtatcgtccttgtctcgattgagactgggccggtaccgttttttttgatgtccatgacataggtatttgtcggcggtttgtgaggattcggcgaaacttttttgacgaattacaaatcaaatacttgcgttgttggttggcactcgtataataggcagagttagtaaacttaaagtttagtttaacgaaacccacaaaggcggtgtcttatggagattggcagtcgaattcgagacttacgaatccggaaaaacttgacccaagaagagttaggcgagcgaacggatctcacaaagggctatatttcgcaggtggagcatgaccagagttcaccgtcacttgagactttttttgatattttgagtgttttgggtgaatctccggctgatttttttcgtgaggaaccaaaagattccttggtttatcacgaggatgatcaagtcacatatttggatgaagaaaaagggtaccgtttgaaatggctggtgcctgaaagcaatgaaaatgaaatggaaccggtcatgatcgattttgccgcgcacggcatttttaaaacgttcgagccttcaccggcagaaacctttgtttacgttgttagtggtcgtgtcaaattactgctgggtgaacaaacttatgttgcaaagaaaggcgagacaatttactttcacgcaaccaagcaacatcaattggtcaacgccgcgacgggtcgtagtaagtgcttgctagtcgcgacggcatcttatttataaggagttggggtcattgagcaacattatcgttgaactgaagcatgtcggtaagcggtacggcgacacgcaggtgctgaaggatatcaacattgagatcgaacaaggcaagttttacacgttgttggggccatccggatcgggtaaaacaacgattttgcgtgcaattgcggggtttttggatgtctcagaaggtgaagtgctgtttgatggcaagcggatcaatgatgtgcctgccaaccagcgcaaggtaaatacggttttccaagactatgccctcttcccgcacctaaacgtttttgacaatgttgcattcgggttgcggttgcatcggatgagcaagcaggacattcagacaaaggtcgaagatgccttaaaaatggttcgattacaaggttatgctgatcgggaaatttctgaattatccggtggtcaacaacagcgagttgccattgctcgagcgattgtcctcgagccgcaagtattgctgctagacgaaccgttatcagcacttgacgctaaattgcgtaaggatatgcaatatgaattgcgcgaattgcaggaacggttggggatcactttcctatttgtgacacacgaccaagaagaagcgttggccttgtcggacgaaatttttgtcatgaacgatggtgaagtgcaacaaagtggtacgccagttgatatttatgatgagccggtcaatcattttgtggcggatttcattggtgaaagtaacatcattcaagggcacatgattaaggacttcttagttgagttcaatggcaaacggtttgaatgtgccgatgccggaatgcgtccaaatgaaccagttgaagttgttttgcgcccagaagatttggacattaccccagcaaattcaggcaaggtcaatgttgaagtagacacccaactgttccgcggtgactactacgaaattgtgggttacgacgatctcaagaatgaatggttgattcactcaaccaaccccgccaaagacggcgaaacggttggcttgacgtttgatcctgaggacatccatgtcatgcggcttaacgaatctgaagaagatttcgacgctcggctggaaacctacgaaggggaataacgtcagtaaggatcagttggggcagtgtcatcgaagcgttttgacgattagatagacactggtcggcgctgatcgattttcgaactgaggagggtcatcgtgaaaaaatccaccacaaacgctgcattctacacaccttatgtgatgtggctggcattatttgtgatcgcaccgatggttttaatcgtttatcaaagtttctttaacatcagcggtcactttacccttgccaattatcagacctattttcaatcaggcacttatattatgatgacgatcaattccgtctggtatgcgttcctgatcacgttagcaactttgttaatcagctatccaacagcatatttgctgcattatgccaagcataaacagttatggttgttgctgattattctaccgacttggattaacttgctgctgaaagcatacgccttcatcgggatcttcagtcaggatggcggggttaatagtttcttgggaatgtttggcatcgcgccccagcaattcctgttcacggattttagtttcatttttgttgctgcttatattgaaatcccgttcatgatcttgccgattttcaatgcaatcgaagaattaccggaaaaccttgtcaatgctgcccaagatttaggggccaaaagctggcagaccttcaccaaggtgatctggccgttaacaatttccggcgtgaaatccggggttcaagctgttttcattcctagtttaagtttattcatgttgacgcgtctgatcggcgggaaccgggtcattactttggggacagccattgaagagcattttctgacaacgatgaactggggcatgggttcgacgatcggggttgtcctgatcgtcgccatgttcatcatcatgttcctgaccggcgaacgtaagaagaagggggcgcggcgtcatgaagcgtaaattcaaatggtccaacctttatctgatcttcgtcttcatctgtttgtatgtgccgatcttttatttggttatctactcgttttcaacgggagatcgcatgagcaattacagcggcttcacatggaaacattatgctgagctgtttgctgacacccggatgattcaaattgttctggatacgttgctagtcgcgctattatccagtttgatcgctacgattatcggtgcgttaggagcattagcaattgatcgtactagtcgacctgttgttaaaaacacggtcttatccctcaacaacattctcatggtgagtccagatgtcattatcggtgctagttttctgatcttctataccgcgttgaaagtgccattgggtttctggtccgtcttgatgagccatattgccttttctatcccgattgtcgtgttgatgatcctaccgcggcttcaggaaatgagccattctttactagatgctgctcgtgatttaggcgcgtccaactatcaagttttaacgcgcgtgatcgtgccttatattacgccgggtattttttccggctttttcatggcctttacgtattcactagatgattttgccgtgaccttctttgtcactggtaatggttttgaaacactggcagtcgaaatatacgctcgcgcacgacaaggcatcagtttggagatcaatgcgttgtcaggcgtcatgtttatctttgctttactgctggtagtcggttactacttcattcaacaagcaggtcaaaatcggcgagccaaacaaaaacacaagcgagaaagcgaggcgttgatcaatgaaacgactcattagtattgcgattgccatcttagctgtttgtctcggattagcagtttggagtgaaggattacaaaaatcgcaaggtgacacgggtgaaaacacgttaaaccttttcaactggggcgattacatcgatccggcgctgatcagccagtttgaaaaacaaactggctatcatgttaatcaagaaacctttgattcaaatgaagccatgttcaccaagattcaacaaggtggtacaagctacgatttgacagtaccatctgactacatgatcgaaaaaatgaaaaaggccaatctgttgctaccactcgataaaagtaaattacgcgggatgcaaaacatggacccgcgtttaatcgataaagattttgatcgcaacaataaatacagcattccgtatttctggggaacgctggggattatttacaacgataagtttgtcaaagccagtgaagttcaacactgggatcaactatggaacccgaaattcaaagattcaatcatgttgattgattcggcccgcgacgtgtttgcaccagcgctcatttcgatgggcaagtcggttaatgaaaccaacccgcaaaccttagcgctcgccaaggcaaaacttgatcagctgtcgcctaatgtgaaagctgttgttgctgatgaaatcaaaatgtacatggccgagaacgaggctaagattgccgttgactggtcaggtgaagccagtgagatgttggccaacaataaacatctgcactatgttgtcccgcgcgaaggcagcaatctctggtttgacaacttggtcatccctaagacggctaagcattttaaggccatctatgcctttctaaacttcatgatggaacccaaaaacgcggctcaaaatgccgaatatgtcggttatgcaacaccaaatgcagccgccaagaagctcctaccaaagagtgtgcaaaatgatcgccaattttatccagatgatgaaacaatgaaacatttggagatttattctgatctgccaccagctaaggttgggctttataatgatcttttcttggaattcaaaatgtatcgccgatgagaaggctcatcgcttacagtccgctatgattagctaaaaatgctaatttgcgggctttttttgggtcactttttcgattgcttcggtagtcttaaacgacaaggatttaactgatgatctcgcaaaaaataagccttgataacaaagagcgatgagggaaaatggctttaaagatgagaacgttttctaaaatgcacatcacactagcaaaatctggtacgcttattgcaatgaaaaacatctgattgtgctccagcgtcattaaccgacaaagggataaacggttttgcagtcgtcttggatacttgtttcagatacgatcactaagaggtgggcagcttgggaaagagaacttacaaaaatgaagagcgctgggtagacgttgtttgttgccttagcctttggttggcatcttttagtttgatggcagccgctacggtactggatgtcaatcgtccattcttcattattatgctgtcattaacggcctgcgccattggcgaaacggtgacgttggttaggaaaaagcgctgaggcggatgataagattgtttaatgctatcacgcgtcacggtaaaatgggccagtattagctgtgtcttttcagtgattatttttgtgactaatcaaccaataaccgactacgaaaaatacagttccaagtgttgcaattcctaaagcatcgagcaatatggaagcgataaaaccattccgaatggcaaaccatacaactgcactgacaaacatcacgcaccatcctccaacaaaacttagaccaacaactttatttgtttgcatcaatttaacctccagtaatagtttaagctgccaatgagaatgccttctatcttatagcaaggataacatgaaactgaaaatgttggttacattttttaacataggggcagtgatctttcagctttatggcgatttaatgcacgccacttcgcacacaataaaaagcgatccgcctatttttggacggatcgctttttgttcatattaaccactattgcctaatcaacaacatcgactttcttagcagccaatcggcgtcgattgagccacttgcgtccttcttcgatgaggaagagcggaattggaataatagccaagaagatccaatccgttggggcgagtgggccggtgtgaaagagttcctgtaagaatggggtatagctgagtagtgccaataggaaaatttcaaagacgatcccgaaccaaacgagtttgttggcaaaaagaccggctttgaaaacagaagcattttcggttcggcagttcatcgctgcggcaatctgacagaagatgatggcggccaaggtcatggtagtcgccatgacgtaagtgttgccactggttgccagacccttcaacggccaaccattgagatggttgacgaagaagtaggcaccgcttgaaatgattgaggcaatcaggccataccaagcaaacgccttccagagaacggttttactcatgaggtgggcatcgcgtgctcgcggtggcttgtccatgatgccaggttccgctttctcagagccaagacctaaggctggcatcatgtcggtgccaagatcgacggtcaaaatttgcatgacagtcaacgggagcggaatcgcaccacgtgagaacaggaataaggctgaaggtaccgcttcaggcaagttagaattcaagatgtagatcaggaatttctgaatgttactgtaaacggttcgaccttcttcaatggcggcaacaattgaggcaaagttgtcatcggttaggatcatatcagcggcatccttggcgacatcggtgccggtaacgcccatggcaacaccaatgtcggcttttttcaaggctggggcatcattgacaccatcgccggtagaagcaacgatctcgcccatttcttgcaaggttgagacgattttgtatttctgctctggggcgacccgtgcgaaaatgatttcgccagcaagtgccttttttaaatcttctttactcattgaatcgagttcgccaccggtgacaacccgcgctttgtcagaagtgaggccgattttgaccgcgacggacttagctgttaaggaagagtcgccggtaaccataataattttgatgctggcacggtgacatttcttgatggcttcgtaaatttccggacgtggcggatcggacatgattgctaagccaacaaaggtcaaattggtttcggccgtgtcgattgtgaggccgtcaagttgtttttctttatctgtttcttgaggcacctcacgataagcggtggcaatggaacgcaggccgagggaagcatatttgcggttggcatcgtcaatcgcttttttatcgtcttcagtcagtggccgaactttgccattttcttggatagtgtcacaatgcggcagcaaatcgctcagcgagcctttggtgcaaattgataaggtgtgatcgtcatgttgatgaatggtggtcatacgcttccgatctgaatcaaacggcagctctttcaggcgtggatacttaatgctgtatgccttggtatcaatgccggacttttgggccaaaatgaccagtgaggcttcagtcggggtacctaggattttcggccgagcactgccttttgacggctcaacttcagtatcattattgaaggcaactaagcggatcagcaaatccagatcggcatcggtgccatatttaatgggtttcccgtccagttgaatctggccattattcacgaagccttggccagtaacggtgaaggaatgagcaggtgtccagatgtgatccacggtcatctgattttgggttaaggtgccggttttatctgaacagatcaccgtggtttcgcctaaggtttcaacactattcagatcttttaacaacgcatgctttttggccatgcgttgaacgccttgagccaaggacaatgtgactgttggcaacaagccttcagggatgaaggctacgatcatacccaaggcgaaaatgaaactttgagccacagggtagtggacaaagaagattgccgaaacgaagaataccagaccaagaccgatggcaatcagtgaaatctgtttggttaaacgatttagctctaattgtaagggactcagacttggtttttgttgttgcgttaacgccgcaattcgaccaaactcggtattcatccccgtggcaaatgccacagcagttgccgtgccagcgccaacagtagtgccagcataaacaaggtttgattccgcgaactcaccttgaccagcatcaaaggcaactttttttgattcaggtaccgattcaccagttagggcactttgatcgacttgaaccgaagtggccttaatcaagcgcgcatcaaccggaaccgcattgcctgcctgaagattgaaaacatccccaggtaccattttggttgcattaatttgctgcagtttgccatcgcgataaacttgcgtataagccggtagcattttcattaacgagtcagttgctttttgagcttcatgttcttgccaatagctgaaaacaccgttgataatattgaccagccaaatggcaatccctaattcgagggtgcctgacaggatggcgacaaagccgctgacccacaacagaatggccatcacgcttgtgaaatttttgaggaaaatgagtaattgtgattgttgcttttccctagtaatcacgttttccccatacttttctaggcggtcggcggcctccttccgcgttaatccagttgacgttgtatgcaaatccgtcatcagatccgggacgggatccgttgcaaacttgcgccgcgtctccttttcatttttcatgacttaagcacgtctccttcataaagatgtttagcttcattctaacgttctgagcggaggaaaacacccaaagtgctgtttttaagcaattaaacttttcggcttaggcgcggagaccgcgttctaagaattcaaccgcttcgtgaacggcagtttcgagatcaaaagcggattgttcaccgataatgagtggtaataggtaactaagcacggttccaaaaatggctcgtaggactcgattaaatggccaatcaaccaattgtccgttagcctgataagttgcataaaggcgcgcggcttttcccgataactcgcggttgaattgctcagcgagctcttgtcctaaggcagcgtcacgaagaacagtggctgctaaaacccgtagctgggcttgattagcaatggcaaactgcatacgatcatgaacaatgaacgttaaaaaagtgtgtaagtcgggcaaatcttgttcaccgacttcattaacaaactcggttaatacgtttggcattacttggcgaatcataggggctagtagcgcctgaagaatcccatctttcgtcttgaactgcttgtaaactgtgccttcgctgacctgtgccgtttcagcaatttctttagtgctagtgcgatcaaagccttgactagcaaataacgctaaactggcctttaaaacggcttgctgtttagcggatagattgcttttggcgagtgaagcggaaaacaaatcggtaatattacgtgtgtgcatcgcgagatcgcttcccttcaataaaaattgctcgactttacacttgccggtatttccgcatcgtgagtaaatttaatccaagaaataataggaagaatcctaacaaggcaaccacatctggatagaagacggcaagcgactgacctttggcgataataccggttaaggcattagcaccatagtataaaggcatgatgtgagcgatgggttgcagccacccaagcatgtgatcaattggaattaatcccgtaaagaaaatttggggaataaccacaattggaatgaattgcagcatctgaaattcagtgtcagcaaaggttgaaatcaacaagcccagtgccaaggcagtgaacgctaatagtaaattgatcaaaaagatggcggggatgctgccaagaatttgaattttgaatacgatcaaggaataaccaacgattagcaatgtctgaataatggcgaaaataccataacctagtaggtaaccgctaatgatttcaccgcggcgaaccggcgttgccagtaaacggtataaggtgccagtggtccgctcgcgcaacaaagcgatgcccgaaatcaaaaagacaaagaagaagacaatgaatcccattaaaatcggcaacagggtgtcaaagtaagttgagtcggcagagccatatcggtaatgggttgttaacgtgtaactcggtgtttttggctgatggggttctggaatttgggctgcgccgtgcgtggcctgtttgagagctgtcgcaagcatttgtaaggtggttgcttggatcttaagcgctgtggcagcggcttgcatttttagtttgatagaagcggcttgcaaggtttgtttcagaatcgcgctttttccttgatcagcgttggccaacgtcagggtcagcttatcgccatcctgcgtgagtacaccggcataatcatgagccttgattaatgcgatgggttggtcatttttgacctgatgcaatcgaacgtgtttggtatcgatcgcctttgttagtgccgaatcaacagcatgaactgctaaatcagccttggtgtccgtattggattgaaaaagaaaaaagatcaacgtcatgataaataaaggcgcgataaacatcagggctaacgtgcgtttatcacggaacatttcttttaaaatccgattaatcaacgcttcaatgcgcatcttgctgcctccctgcggctaaaaagaccgcttcaatcgagtccgtttgataatctgcctttaattgtgccggtgtcccttgggcaatggcagtcccgttgcgaatcatcaataacgtgtccgcttcttcggcatcagccatgacgtgggtcgttaaaataatggcgacaccctgatccgccagacgatgcaattcatgccaaatctgttggcgcagctcagggtcaatgccaacggtcggttcatctaaaatcaacaactgcggttgactgatgagggcgatggcgagcgataatcggcgcttcatcccgcctgaataatccttaactggttgctttaaggccggttgcagattgacgacattagcagcataagccatttgtttggtaatctgcgcgtgtgggacgccttgcattttggcaaaaaatgtcaggttctcggcaccggttaaactttcatataaagcatcagtctgagccatgaagccgattttcgcgagtaggggacgattcggcacggcttgccctaaaacgctgacttgtccggtgcgtgggcgcaacatacccataatggtactgactaaagtggttttgccagcaccgctaggaccgattaaagcaagaatttgaccatgatttaaggtcaagttgatgtccttaagcacgatctgtttaccatagccttgggtgagggcgctgacctgaacagcttgatttgtttgcatattatcgcgtcactttctcaataatatagtgagtgctcactcacttgccattatcgccaattttggggtaaaagcaactaaaagtttaaaagtcatcagccaaatcaatcagattgttgtcaaaaggatggcatctaaaagctgcttcaagctgtgttatagcgactgaaaccgcttatgctcccgtttctggccgcgcctgtgcacacctcgtggtataattattcagaagtttgattctaaaccacaatggaggaacgcggatgcgcacctatctgacaaatttattaacttggtccaccttgatcaatctggttgacatcctcgtcgtctggtatgtcatttatcgtttgatcatgcttgttcgcggtacaaaagcggttcagcttctgaaaggcgtttttgtcattgctgcgatcaagattatttcttggtcccttcagttgaagacggtcggttatttaactgatttggttattacttggagtgtgccagcactggttattatttttcagccggaaattcggcgtggccttgagcacctaggtcgcggttccttgatttttcggtcgaataataaccagcacgaagtcgaagtacggatggtcaaagaacttgataaggctattcaatatatgagcaagcgccggatcggggccttaatgacgatccagaagagtaccgggctggaggattacattgagacaggtattcccttggatgctgatattagtggagagctgctgatcaacattttcataccgaatacgccgttgcatgatggggcggtgatcattcgggacaatcgaattgcggttgcggctgcatacttacctttatctgacagcaatctcattcctaaagaacttggtacgcgccatcgtgctgctgtcgggatcagtgaagtgacggatgcgttgacgatcgttgtctctgaagaaactggggaagtgacgatcacaaataacaacaacctgattcgtaatttgacgcgtgatgactatatgaagtttctgacggcgcaattagtgccaaaagaagaggcgccgaatccgaacccagttgtcagtttcttttcgcgccggtttaagtcacgtaaaaagaaggagggcaagcaatgaatcgcttatgggataatccatgggttaatcggttgttggctctgcttctcgcgattgggctttttgcttatgtcaacgttgaaagcatcaacaataccagacaaagtgcaaatgatgatacaaccttggttgccaacaaaacccagaccgtgaaagtgccgttacaggtaaatgccaacacggacaagtattttattaccggttatccgtcaaaagtttcagttgcattgacaggaacggcttcattagtcacgatgaccgccaacacccaaaattttcggatcattgctgatcttaccaaactcggtgttggcaagcatcgtgttcggttgaaggcagaaggtttgaacaaggatttgagttattcgatttcgcctaaatccgtgaccgttgacattcaggttcgggacaataagacgatgccgattcaggttcgctataataaagccagtatcgcatccgggtatgcagctggtgagccaaagctgtcgacgcgaacagtggatgtcactggcgcacgatccgtgattgactcgatcgcacaagttgtggcaaatgtctcgctgtcgcacaatacccggagtacggttgaccaagaggtgctgttacaggcgcttgatgagaacggcaatacgatgaatgttgtgttggcaccgcagactgttcatgtaaccttaccgatttctcaacctagcaagaaacttaccgtggagctaaaacaaactgggactgccgtgtcaggacgcacgtatgtcttgtcctctgacacaaaacaggttaccgtatacggagaccaaagtagtttggacaagctgagtaaattaaccgtggacgtcgatgtcagcggtattagcacgacgacaactcggacttacaacgtaactgatttgaatgatggtatttctgctgctagtccgaaatcacttaaagtgacgattagtgttggcaacactggtaatgatgataataacaacaatggcggttcaacagcgagcaccagtacttcgagttcgagtgccgcaagcacctcgagtgccagtgaatcagactcaagtacatcaacaagcgacaataatggctgaaagaaatgaggaagaattaagatgacaaagtattttggtactgatggcgttcgtggtattgcaaacaaggaactaagtccggaaatggctttccggctagggcggacaggcggctatgttttgacgcagcacaaagaagatgcgagtcgacgcccattggttttggttgctcgcgatacacgaatctcagggcagatgttggctgatgctttaattgctggcttgctttctgttgggattgaagtgctggatttaggcgtgatcacaacgcctgctgttgcttatttaatcaagattcaaggcgccgatgctggtatccagatttcggcgtcgcataatccggttgccgataatggcatcaagttctttggagcggacggctacaaattgtctgacgatactgaagaagaaattgaagccttactggatgcgccagaagacaaacttccacggccggctgctgaaggattaggtacagtagacgattatcctgaaggcgcactcaagtacacccaatttcttgagcaaaccttggcagatgatctgagtggcattcatgtgtgcttggatggcgcaaatggtgcaacgagtgggttagttagtcgaatttttgctgatcttgagaccgattttgatacaatggcaatcagtccagatgggcttaatatcaatgctaacgttggttcaacgcatcctcaggcgttatcgaaatttgtcgtcgaaaaaggtgctgatgttggcctcgcgtttgacggtgacggtgatcgctgtatcgcagttgatgaacaaggcaatattgttgatggcgacaagattatgttcattcttggtagttatatgaagtcacaaggccggctgaagcaggatactgtcgtcaccactgttatgagtaatcttgggttatataaggcattagaagcgaatggcatgaagtccgtgcaaacggctgtcggcgatcgccacgttgtcgaagccatgcgcaaagatggctataatattggcggcgaacagtctggccacgtcattttgtttgattatcacaataccggggatggcatgctgacaggcattcacttgttaaatgtcatgaagaaaaccggcaagaagttgtctgaattagccgcacctgttcaagactatccgcagaaactggttaatgtgaaagttgcggacaaggaaaactggcaagcttatccagaaatccaaagtgccattgataccgtcgaaaaagaaatggccggtgatggccgtgttctggttcgcccttcaggcactgaacctttgttgcgggtcatggccgaagccaaaaccgaagatttggtttcccgttatgtggatcaaatcgtggatgtggtgaagcaagaaatgggcagcaaggaagattaactgctgtctttatcaaaaatttaaactttattttaaccgagttgtcacgggtctcatcgacaactcggtttttttgtctggtgatagcattcgcaattggcacgttttgaaagcgcgttcataaaattccaaaaccagtgtgcataagaattgggtaaattaatatagaccaatatatatgtttcaagtataccagtgaaaaaatggtgttgacatatagccttttaaaaactatagttagctttgctttcaacaataccaataaaaaatctgtctaaaccaatttttagacaaaaatgaaaaggatgttgactatgtgtggaatcgttggcgttatcggtaaaaagaatgcaacgcagatcttgcttaagggattagagaagttggaataccgcggctatgattcagccggcatttacgtgaatgaccaagccggccatgatcatttaattaagcgcgtcggccacatttccaatcttgaagaagcggttacgcctgatgttcaaggcgttatggggattggccatacgcgctgggcaaccaatggcggccctaccgaagccaacgcccatccgcatgtttccaatgacgaacggttttatctggtgcataacggcgttgtgaccaatgctaacgaactgaagcagcagtacttgcaagacattgaattacagagtgatacggataccgaagttgttgttcagctgattgccttgtttgcccgcgaaggtctgtctgctaaggaagcactgcgcaaaaccttgaaaatgatccaaggttcttatgctttctcgatggttgatcgccttgacccaacagtgctgtatgttgctaaaaacaagagtccattactgattggccgtggtaaaggctttaatgtggtggcttctgatgccttggcaatgcttagtgaaaccgatcagtttgttgaactgaaggatcaggaaatcgtgaccttgacggctgatgccatccacattgaaacgattgacggtaaagttgaggaacgtaagccattcaccgttaaagttgatgatggtgaagtttctaaaggtacgtacccattcttcatgcttaaagaaatcgacgaacagccaatcgtgatgcggcgtttggtcgaaaagtataccgatgatcatggcaacatcgttttgccagaagatttgctgaaagctttacagcaagctgatcgtttgtatatcgttgcggctggtaccagttatcatgccggtttagtcggtgcacctttgttcgaacaattggcaggtattccgacagaagtgcatgttgcttctgagtttgcctatcatcaaccactgttgtccaagcacccactgttcattttcctaacccaaagtggagaaactgctgatatccgtcaggtccttgtttcagtcaaggaacgcggttatcagacattaacgatcacaaacgttgccagctcaacgcttgctcgtgaagcaacctttatgttgcagttgcatggcggcccagaaattgcggttgcttctaccaaagcttacacggcacaaatcgccgttgaagcgcttgtatcgaaagcagtcggcgaggctaaaggattgcaggctgctaaggacttcgatgtgatccatgaacttgggttggcagcaactggtcagcaggctttgattgaccaaaaggatcgcatccatgaactagcaactgacatgttcaagaccacgcgcaatgctttctacattggccgtggcgatgattactatgccagcatggaagcagcattgaaactcaaggaaatcagttatgttcaggcagaaggctttgcggctggtgaattgaagcatggtacgattgctttgattgaaaagaatacgccagtggttgcaatcatttctgatccggttacagcagcgcgcactcgcagcaatgcggacgaggtgcaagctcgcggtgccaaggtgcttcatatcgcaatggctagtcaagcccaagatggtgaccaaatcgttgtcgatgaaatcaatccattacttgcaccgcttttgacgattatcccggcacagctcttggcttactttactagtgcggatcgtggttacgatgttgaccgtccgcgtaatctggctaagtcagtgaccgttgaataatcgctaagaatttcatttggtgatcggtgtcattcatgtcaagatgtggattcaatccccagcttggtgtctgacgtcgtagcggatcgtgatccatgtatataaaaaagtgttgcatcacgggtatcctcgtgatgcaacacttttttaataagcacaaattaagtatttgtgcgctaagtgacacgctgcaaatcgggaagaactttatttcaagtaaccttcactcaaagtcataaactgttgcgcatctttggcggctaaatcaatgccttgctgccagaaatccggttgcgttaagtcaaccccgagatgttttttcgctagtgcttctgttgtcatattcgccgtatcccgcaacaaagcaatgtaatcatcttcaaaattatcagatgcttgggcctttgcgtaaataccgctagagaacagataaccaaaagtgtaagggaagttgtagaacggtgggttgtcgaagtagaaatgcagtttgtctgcccaatacatgggatcaaaagaacttagaccacctgcataggcttgttgttgtgcagtcgtcatgagttctttcagtcgtggcacactgacaattcctttttcccgttcctgatagaaactgtcttcaaacaggaagcgagcatggatatttaacagcatcgccaatggattggccattttagcgtctaacaaattaagtttctcagccggtgaggttgctgctttgactgtggcatctgcaacgattaattctgcaaaagttgatgcagtttcggcaacattcattgcataatcttgacgcaatagcggcatatctttcaaaatactgctgtggaaagcatggcccaattcgtgggcaatggtggaaacaccagatgctgaaccatcgaaggtcatgaaaatacgactttctttgacatctgggacgctggtcatgtaaccgccagcgcgcttgcctggccgatcttcagcttcgatccagccattttcaaatgcctgtttggcaaaggcagccattttaggtgagaacttggcaaagttgttcacaataaattcggcggcctcatcgaaggtataggtctttggctgaaaatcgcccacgatgactggcgcccattggtcataccatggcattgttggcttaccagttaattcggccttgcgcgtgaggtaagcagcaaaaggctgtttgttggcgctgatggtgtgccacatttgatccagcgtggcacgttgcatgcgattgtattgcaacggtttgaaaagataatccggataatgatgcaaccgataattcgtaagccggaagccggcaatgtgattcagggtctcaccaaacagactggcatgatcgtcccacgtttgttcccaaacgttaaagacttgttcacgcgttttagtgtcaggatcgccttcgaatttattctgggtttggccagcactaagctctgtggttttgccatcttgtgtgattggaaacttaagactgccactcaaggtggtgtaatgatcgctccagccagtaaaaccatcgactgccagatcgttaatcatcgtttcggtttgatcatctaacagttcctttgcctggtcgcgcatctcttgcaagccaaaacgactagcgcttaaagctgacgtggtcgttagctgatcgaaagctgcttgtgacatggctgcgagttttttggccagcgggttgttaatgttttgaaaacgggtataaagtgtcgtgagctgaccttgaacaggtccggttttcagattagctgtatcagcgctggcaatcatctcgacgaagctgctagtagtagctaggcctttgccaatgtcttccagcagttgccaaagtgtgatgaaatcggtaaactcaggagcatcgtggtcagggatccaagcggctacttttgactccagttgaggcaatttggccgtcacatcgctaattcggtcggcaagttgcggtgagtcaataccaccggggaaaatcgaatcgaggttccagttaattggataagacatattggcacttcctttcgaaatagctttattataccgtagatgagaaaagtctgagtgaaagcaggtagaagtttgtgacgtcttttaaaaaacattgggggttgtggctggcggcagtccttttgtttgtcttgttctttagttccagtatgacttacaaagagcaaacaacggtgccgttattggaacgcttgttacacaatgaaccgtttaagcaagccttaagtggtattcattttaattatgcgggtgaacagcaatcaattgctgaggtaggctattttaaatttgttgaatttttcattcgcaaaggtgcgcatgtcagcatctttttcctattaggtcttggtctgacacaaggcacgtttatgtatcagaaaaatcgttggctgcattggccgctgatggtcttaagttgtaccggtgttgcggcatttgacgagtttcatcaaatgctgacaggcgggcggacaccgcttttccaagatgtgatgctcgatactgctgctgcggctgtggccgtgaccttaatgtggttatggttatggcggcagaagcgtcattgaataaagtgccgatctttgctataattttagcgattcatatgctcctaaacttacgaaaagagggtttatcatgtcaggacattccaaatggcataacattcagggccgtaaaaatgctcaggattcgaaacgtggtaaaattttccagaaattatcacgtgaattatacatggcagcaaagcaaggtggtcctgaccccagtggtaatccttcccttcgtttagtcatggataaagctaaagctgccaatatgccaaaagacaatattaagcgtgctttagataaagcaagtgatcgtgatgcggccaactatgacgaagtgacctatgaaggctatgggccaggtggtgtggcgattttggttgaagctttgaccgataatcgcaaccggacttccagtaccgtacgagtggcgatcacccgacacggtgggaacatggcagctgctggtgcggtttcatacatgtttgatcgaaaaggttatctggtgattagccgtgatgaccttgatgttgacgaagatcagatgctagaagatgcgcttgaagccggtgcagaagatatgcagacttcagatgaggcattcgaaatctacaccgatcctaaagaatttgctcaggttcgcgacgcgcttgaggaaaaagggtacaagtttgtccaaaacgaactgacaatggttccgcaaaacctgaccccgattccagaagataaagttgaacaattccaagctatgattgatcaattggaagacgacgatgatgtgcaggaagtttacacagctggcgactggccagacgattaatgcatcgattgatagcttgtgatcaagacgagggaaaatcctcgtctttttttctgcccaaaatagtcaagaggacggggtgatatctgacgctcgcgaactcttttaatacagggggaaaaacgatgcaatcggtgaataagcttttgacaattgcgctggaaaagggtgctagcgatatttactatttgcctagtccgcaaggttatttgattcgcctacgggtaccgacgggcttggtaacaatcgccgagcgagacagcaaacgtgggcagcaagaaattaattacttgaaatttatggcgggcatgaatgttgccgaacatcgccgcgttcaattgggagccttttatcaaagggaatcagcagcttttttacggttaagttcagtggctgactttcgcggtggtgaatcactggtagttcgcataatcaaaggcattccagatgctgcaggcgcacgtcatctgttagatcgtctgttgggtattttactgcagaaacgcggcatgctgaccctagctgggccgactgggtcaggaaaaacgacattactctatcagttagcgacgcgtttggcggaatcacgaatggtcttgtcgatcgaggatccagttgagatcaatcagccgcaatccttacagttgcaagtcaatccggaggcagacatgacctatccgcaattactgaaggcggcgctgcgccatcgaccagacgtcttgctgattggagaaattcgtgatcgacaaacagcgcaaagtgcttgcgaagcggcgattagcggtcacattgtcctagcgaccgtgcatgcccgatcagcggcggatacacccttaaggttgagcagttttggcttgccggatgagttagtagcggcggcattgacggcgagtgcggcgatcagtttgcagtatcggccaatgattcacccagtggcggaagtcgtggttttcaagcaagtaggacaagctgatcaggaggtggtttcgtgagcatgccgctggtgattcaggaacggttttgccgtcaaagcgctgcgttaattgctgctggttttagtttgccggatgtgtttgcttatttgcgtgtgagtttaccgaaataccggccaatttgggaacgaatcgaaacggatttggcttctggcatcggattgccagaagcagttggccatcaggcattagctcccatcctctttcaacaactgcaactagcacaggttcacggggatttggcaaaagcattggccgtggctggtgattacttaggcttgcgagtgcggaatcgtcaacggattggtcaactattaatttacccacttgtgttactgggcatgcttgttaccttgcaagtggtcgttgtgtttggcgtgttgccagccttggcgttaccacaatcgcatttagtgcatacgcagttaatgaccatgggtgggggcttagccgccgggttgctaatatggctcgggtggcatcgactgacgttggctcaacgcttgcaactcttacaacgattgcctggtgtccgtggcgtcatgcaagtgtactatcagtttcagttcacagccggagccgcccacttcttactggcaggtgctgagattgccgacttttgccgacacttgataaccgttggcggtccgttgggtgatttaggagcacgcattcaacaaaagattcaacaaggggctgagttggccgatgcgttacacgaagcctttgtgccacctgaagttgcccgtttattgacaatgggccagacacatcacttagtggcgaccggcttaaaactttttggtgaacaactatttttacagttgcagcaacgtttagaacgactggtgaacttggtgcagccattgctgtttttgcttattggtggcgaaattttactggtttatttgcaaattctcttaccactctatcaatctttcggaggatgaccatgcgacgcaaacgattacgggcttttacattgattgaagtgattgcagcacttggggtcattattttattgacgttagctttggttttgacaattcaagggcaaatgaaacgtgttgaaggtcagaatctaaaagctacggtggcaactgtgaattcacaaattgaaatggcttataacgagccggatgctgacaagaaatcacttaaaacaattcctgatttagtcagagaaggcgtgattaccgatgcgcaggcgaaggacttggaaaaaggcaaggcaacgatgagcggtgacaatccgccgaaatttaaagttccatgaaacggctgcgtggctttgtgatgcttgaagtggtggctgttgtggttgtgctggcaggattgacactggcggccgttcccttagggcaaagcgtgattcgccgaaatcaggaaaccaaatttctcgaaaccatgcgggaacaatggggattattagggatgaaggcatatgccacgcataaaattggcaccatgtctgtcaatgatgaggcacgtcaggtgacatttagtctttttaatggttcaaaacgaattttgccatttccgccatccttgaaatatgacgataaaattcctacaaaaacgacgagagaaccatcaggtaaattgaaaggcaaccgcagcgtaaattttctcagtcaagacggctattactggcatataaccctacagtttgaatgggggcggttcttattccaaaaagtaccaaaacattaacaggttctttgttaattgaacatcttgcagctctgggggtgctcttgctggcggttggttggttaatggtgttagtgcggttatatgaccgagttgtggttgaatccagacagcgaacgacggcctattatgcggcacgggtggcgcttgttcatttgccagtaccaggcggagagacgactgttcaagtcggacctgatgtgtggcaagtaaccgtcaatacgcaggaggtaaaggcgcatgcccaaaagggtcgatcaacatatacgttcacgccttaaaggctttactttaattgaagtggtggtcagcctgattttacttgcggcggtcatgctgttatggcgaccggttttattgcatgtcacgcggttcacgcttcaagaccatgtgctaatcacgtcattgcaagcagagcatgacttgcaaatgtttgtacgagataaaaagttgcggtctgtggccttaatgtcggtaagggtgagaagtcccgagaaagcttacacgatcaatttttatcaggccaaacattttcgcggtatggttcgtgtgatgggatctgaaaatgggcatatgccattatttacgcatctaaccggggtcaattttagcaaggtagctcaaggctttcgctatcgtctgtatttgacgacttcgcagaagattgacggtggggtgcaaatcgatgaagatacgcggtagtgttttgatcaacacactgatactgtttgctttacttctaatgctgactgttggcgcgatgcaacgttttcgtgattggcaggaaagttatcaggtgcttgaacaggtagaaaagcgccaatttacggaggcatacaaccattggcgagaacagatgtctgataaatcgaaaagcgaggctgattcctcgacttcagctggcaaggaatctgatacatcagctattcgatcagcgccgccagcgattggtgagaccaaagaagcgactaaggaacagcttgaggcaactagatcagggattcacgcgcttgaataagcttttctcaatcggtacactggtaagcggagtgtcggcgatgaccagcgcctgcacgcatcgttttttaggcctgaaaccgtattgatagggggaagcatcttggcccacgaacatctagagaagctgtacaatgttttggatgaaagcacgacaattttgcatcaacaattgaaaacatcttttattgctgctgttattgaggcgggagaggatcttgcgtcgggcaacgtcatgcaagaagacggtgttcccaacgatgaagctaaaaagaagctaacagcgttgtttgatcagatcaaactcgccacctatgagccggaagagattcgtcaagccattcaattagtgcttgttaaggcaatcaaggtagatggcattgaacccaataagcaagtcacgcctgatgccatggccagtcttgcgacatttatggtgacggtttttgcgcaacatctgccaaaaaagatgcaagtcgccgatctggccgttgggacggggaatcttttatttgctgtgatgaatcagctccacaatgcgcgtcaggtggcagtcaaaggctacggcattgataatgacgaaaccttattagcagttgcaggcatgagcagtacgttgcaacaattagatgttgatctttttcatcaggatgccttagataatcttttgtttaaagacatcgatgttgttgtttctgatttgccagttggttactacccggttgacgaacgcgccaagcaatttgagaccgcggcggccaagggacattcttatgcgcatcatttgttaatcgagcaaagtatgcgggtcttgaagccaggaggattgggtttattttatgtgccgagtcaggttttccgttctgaagaagcggcggggctgacagcttggctggcgaagtcgacctacttccaagggttattgaatttgccggaagatttctttgctgaccaaaaggcggagaagagcctgctggttttacagaaaccgagtccggatgtcaagcgtgctaagcagatcttgttaggccaatttccggatctaaatgaccgcgatgcttttgccgcgtttattgacaaagtgaaggattgggcagctgctaatattgcgtgattgattgatttttaagtaaccaaaaaggagagctgacaaacgcttgtcttgtcagctttttttgtcatttcaaaacacttttcatcttgtgatagcaaggcggtatggctgctgtcacaggatttaggacgttagaatagactttactgatccggtcgccactgcctttttaaactggaatcggttagaatgggttatcaaacttaaggagaattaatatgtcattattaagcgtggcctacctgctgattgcaattatttcagttggtgtgaccatctttgatatcattcaaattcggatacatgcgcaaccaaaagtctggcgtattcttttgtatcttgcggtggcagccttttctctggtgttgaccttgcagcaaagtcaacattttgacgatcttgtcagcggcgcctttattgtcgttatgtttatctgttttgcctgctggcagaagggtcttgctgatgctgcgatgattggcgggcttggtagcattcgattgtatcagaatctttctggcgttgttttacaggcaaatgctggggggacgctgctattggcgcaagccggtcaagtgatggttttaaaactgcagtttcgccagtcgccaacagatctacaaagctttttggtcgataaaatgccaccagaacagattcaaatcgtgacagggtgatcagttgggcgttttctgaaaatggtgtataattttttctgatacgattcaaagagctgggatatttctgcatttgcaaagacagaacctgttatgacctgatttttttcgggttaacacgtttataggaggatgagcatgcaagccaagaaagatgacaagcccgaactagcgcgtcacttgaaaagccgacacgtgcaactgattgcgattggcggaacgattgggacaggcctttttctaggatctggccaatccatccacaccgctgggccttccatcttactagcttatctcatcacaggtgggatttgttttctaattatgcgggcattgggtgaattgctaatgtccgatgtgaattcacatacgtttattgattttattagcaaatatatgggaaaagatgctggttgggtgactggctggacctactggatttgttgggtggcggtcgccatggccgaagtgacagcaatcggtctctacattcgattctggttgccaggagttcctcaatggctgccgggcctgattgcactggcagtgttgctgctaatgaatctggttagtgttgggctgtttggtgaggcggagttctggtttgccttgattaagatcgtggccattattgggttaattgcgctcggcgtctttatgctgtttgtgcactataaaacgcctgttggctatgccagcctaagcaacctcgttaatgacggcggcttttttccaaaaggaatgagcggttttctaatgtcgctgcaaatggtggtgtttagtttcgtcgggatcgaaatggtcgggttgactgctagtgaaaccaaagatccgcataaagtgattccagaagcgatcaatgagattccgatgcggattttactgttttacattggcgcattgtttgtcattatgtgcatctacccatggcgcgatgtgtcacccgttaatagtccttttgtcgaggtttttcgtaatgtcgggattccagccgccgccgacattattaattttgtggtgttgacagcggcagcatctgcctgcaattcatctattttcagcactggcagattactcttctcactgacattaactggtaaaagcaagtccgcacgttggactgctaaactgtctcggcgacaagtgccagcgcgggccattatgatttcaacaggagccattgctgtggctgtcattttgaacctttttttaccggagtctgttttcgcactggtttcaagtgttgctacaatcagctttttatttgtttggggcatgattgtcctcgctcacttgcgctataagaaacaacatccgcgcggaacggattttccaatgccattttatccttattcgaattatcttattttggcgtttttagggctgactgctgtgattatgattttcgatcgggcaatgctgtccgcattgatctttgcggttatctggattgcgacgttattcaccttgcgccgattgcacgctgatcataaagctcacgaagacaaaacaaaagacggtatttaatctgattgagtgagcactcgcttcaataacggaaaagatacttgaggactcatataaaagtgaaaataattttgagtgttcactcaaaattatttattttagggttgactaactttagcaacgcgttatgctattgatggttcgtagatcaacacgcatccgtcatcatgatggcggtttatagagagaggggccgacaatggcaaaagtcgtgacatatcgccacttgacagacgatgttgttgctgcacctgatcaagaaaccgagatcccggataattatcgctgggagccttcatggcggttccggatcaaagcaaatttggtttatgcgggttcttggctttttgcccaagggtattgccgcagcgtcttacatgttcgcaatcgcaaggcctttcgccaggctgccgggcgcggttattttgtttatggtaatcacactcagccttttggggatgttttcacacccatgcgcgtgaatcagtcgcgccgggtttttacgttggcatcaccggctaatctaagcgtgccaattctaggacgaatcgtgccttatggtggcggtttgctggtgccaagcaagttccatcaattgcgcccgtttgctcaagccattcggcgcgttatcaaacaacgacatgtggtcatgatttatcctgaagcccatgtctggccttactataccggcattcggccgtttgaaaatggtgcttttcattatccggtgacaactaacgcaccagtatttgcaaccacaatgacttatcaagcccggcggtggcggcaaaagccacgccggatcttgtatgtcgatggccctttttggccagatgaacagttaccgctcaaagcgcgtcagcagcagttagaggcgcaagttcgaacggcgatgactactcgcgccgccttgagtacggcaacgtatattcactatcagcagcgagaggaggcggattcatgacgatgaacatcatgttttgcggtgatgagaagatgacggatggcgttttgattgctaccttgtcattgatgcggcataccgatcaaccattgcatatttatgtgttaaccgccaagctaaaagtcaatggccatgcttaccagccattctctgcggtgacggctgagcgcatggctgacttgatgcggcaggagaatccgcagcaccgcttgacgcggattgacatcactgatttatttatggctaatccgccgcaagcaaacatgaccacgatgtttaccccttattgcatgttgcgtttgtatgctgatttgattcctgagttgccagatcgtgtgttgtatctcgatactgatattgtgtgccgtcgatcgtttagcaacctgtatcaagaaccaatgaaagacgtcgatattgctggtgtattggatcattatggcaaatggtggttccatcataaattaacctggtttgattatattaattccggggttttgctgatgaaccttgctagcattcggcaagatggcttgctggttcgctgtcggcgcctgatccgccatcgttggctgtttatgccagaccaaagtgcactgaacatcattgcaaagtcaaagcagattttgccgcggaagtataatgaacaacataaagtcgaaacggatactgtcttccaacatttcaccacctcattccgtttctggccgcggtttcgtattgtgacggtcaagccatggcaaatcagtgctgttcatcatcaacttggccttcatgaatatgatgatctattaaacgattatcgtcagttggccccaaaattgaaagaagtgtcttaaatgcctcaacaaactacggttcccattttcttttctgtcgatgacggttacgtaccgtgtctggctgttgctttgacatctattcgaacgaataaagatccgcaaactgatttcgttatcaacattcttaacagtggtttacttcaaaagaatcagacgcggcttgcggctttagcagcgccgcattttacgattaattttatcgacatggacgcggtcacgcagcagattagtggcgacacaaataaactgcgcggcgattatgtgacgttgacgatttatttccggctattcattgctgacatgttcccgcaatatgataaagcaatttatattgatgccgatacggttgccgatggtgatttggcagaattgtttacgactgacctaggcgataatttagtcgctggtgttgcagatccggtgatgatgacatacccggaaaccattgaatacattcagcgtgattttggtgttcaaccaggtgaatacatcaattccggggtattgattttgaatctcgcccagatgcggcaggaacatttctccgaccggtttctgcatttgctaaaaacgtatcattttacaatgattgccgcggatcaagattacatcaatgtgatcgcacagcatcgaatcaagtacctgccaaaaacttggaatatgcaaacaggtgtcccgactgctgctgaatcaggcggcaagttaattcactacaatctttttggcaagccatggcattaccgcgatgctaagttagcggcaaacttttggcattatgcgccagcatctggttttgaaacggatttgaagcagcagttggcggcgtttacgccggctgatcaacaatcggatcgggacagcatggcggcgatgctaaaaaccgccgttcaagtttgccatactgataacacgatcttgaacgcaatcaagcatggcgaacaggtggcgctatgaaatccggcaagtttgttggaccagaccgagccgcggtgatcgaaaatattcgtcgcgcggtggcggctaaggcattcaacgttaaggtggaagaacacgacccgactttctcggaagcacaagaaacagctattattgatcattatttacatcagcggcaacgctggacattccgagtgaaaactttgatttgccgattgctggtgaatgcctatgcagtgagggtcaccagcgatgttgaagttgttggggttgaaaagattcgggcgattaaaagcggtggtgtcatcacgagcaaccactttagtccgtttgaaaatatggcgattcgcaaagctgtccgtttagctggccgccaccggatgtatatcgtgagtcaagacaccaacttggccatgaaagggttgctgggatttgtcatgaattatgacgatacgattccactatccggtcgtccaagttttcttaacggaccatttatgcaaatgctaacgaaggccttttctgggcatcattgggtgttaatttacccagaacaagaaatgtggttcaattatcgcaagcctcgtccacccaagcgcggatcatatttttatgcggctgaggccggggtgcccattatctcgtgtttcactgagattcgtgatttgaaggcgcgtgagaatgatcaattacgcgaggtcagttatgtcctgcatgtacttgatccgatctacccggatcgcaacttatccgtcagagacaacagttttcaaatgatgcaacgcgactatgctcaaaagcggcaggcttatgaagctgcttatggcaagccgctgacttatgcattcagcgaccaggatatagctggttgggacccgcagtaactagcaaaaaaatttttatttcatttaaaaagaaaatgtgctcggcacttgttggacaatctgtccgccaagtgccgatttttttgagcatgaacggatcgactaaataaccgaggccaaagtgacagtaaatgtctcagtgccacttggtatgctgcggtgaatgccaaccgtaaccttcatagtgatcaattgacagtggcgcgcaggtccttcaccaacttgcttgttatgctataacggaagtaagaggttatatttgaaggaggctacgctttgatagatgttataaataatcaagcttttcatcttcacaacgatcaaatcagttatatttacgctttgctgccgaatggtcagctcgggcatctttattttggtccgcgcttgtcattaactaagaacgacttagcctatttgtctcaaggcccaagtccgtttgcgtggatggccaatttttcggacgatcaggaatttgccttgggtgatgctcagcaagagtatcctgtttacggaactggtgattttcgccaaggcagcctgagtgtgacccaagatgatatgccaatttatccgaactttgtttttaaagatgatcaattgacgcatacgaaaacgcgggacttgcaccatccgacgagtttcggcaatccggcattgaccgatgtgctgacgattcatcttgaagataaaacggcccaattgttgttaacgttgcaatatacgatttttgccgacagtgcggcaattgttcgttccgccacactaaccaatcaaggggcagcaccagtgatgattcaacgcatgctgagtggcgttttgaacttgccgcaaggacggtatgacgttgttcatttatctggtaattgggcgaaggagcgtcatattcaaacgcaaccgttaactcagggaacattttcagttgaatcgctacgtggtgcctccagtcatgaacagaatccttttgtggccttacatgcagcgggacagccgtttgcagcaggcgatacctatggggcgaacttgatttattcgggcaactttctggacagcaccgaggtcaacgaatgggatcagactcgattgctaactggcattcatcccgcatcgtttagttggcgcttggttccaaaaaccagttttaccacgccagaaaccgtgtttagttatagctctggtggtcttgccggcttagctcaggccaatcaacgttttgttgctcgccatattattgatccgcaatggcgtcaaaagcagcgtccggtcgtcttaaacagctgggaagcgacttactttgatttgaacgagaagaagttgctcaagttagcggcactcggcaagcaggtcggtgtggactgctttgtgctggatgatggctggttcggaacgcgcgacaatgatttgagttccttgggtgattggtttactaataagcataaatttcccgacggtctcggccattttgctcaggaaattcacgcgatgggcctgcagtttggcctttggtttgaacccgagatggtttcaccgcgatctcaattcttccaagcccatccgaattgggtcgttcgaccaaaaaagggtcgtatctcgattacgcgtaatcaatatgtgttagacttcagcaaccccgctgtcgtcaataatatttttgaacagatgcagaaggtcatcactgaaaccaacttggattatgtgaagtgggatcttaatcgcagcattacagaggccttttcaccgtatctcgaaaagatcggtcatccgcaaggcgagttcttccatcgttacgtacaaggcgtttacacgctctatcagaagctgctaacggcattcccgcatttattgattgaagggtgtgccggcggtggtggccgctttgatctgggcattctgttctacagcccgcaaatttggactagtgatgattccgatgcgatcgaacgcctcgccattcaatcaggcacggctttggcctatccactgagctgcatgagcaatcatgtgacagccgtgccgaatgaacaggttggtcgatcaacgccgctggtcacgcggtttcgggtggcggcctttgggattcttggttatgaactggatctgaccaaacttgatgcgcgaacattggctacgatcaaggctcaaattgcctattaccacgctttacaaccgctagtactgaaaggcgactttagcctattgttaccgcgacagtccaatggtcagaatcaggtggcgtggttgctcagcgctcatgatcgcaagcaccttgttcttggctttttccgagtcttggctgatgcagacagtcgcaccgtgcagtatatgaaggtaccattggcaaaatctgacacaccgtattgggtcaatcagcacacaggcccaatttcgggggatgtcctccagcgcgttggtgtgcgcttaccagtccaattcaatggtgccaatcgcgcacaggctcagttaatcggtgactatcaatcggcactgttgacctttgatagtgtggcaagtttggatcacagtgaaagccagcagaccgatgccgacaagcaaacagttgcctattaaatgtgctgccaaacagctttggtttgacaatggctgttcagatcaggaatatgagtaaaaaaagcccgataaacgagttgcaagtatcagttcttgacttgcagctcatctatcggacttgtttgtccctttttagtcacgatgcttgcttaccagcaaaataccagtaaccaagctcatggtaccggcaacgatgccaacagcaccagcgacaagtgtcacaacaccaacagatcgagaaaaaattttgctcaagagattaacacctttctattgtttggcaggatcgtaactaacaacaatgcatgaatcttgattaggattctcaatccgttcatcgttcgattcattgttcaataaatctggttcatcgctatgacgaaagcgcgcagtaaaaacattttcgtcattaatccgtttaatgtaacgcgcagctgcgccgggactgaccaattgaatggacgttgatttgccatcgttaacggcgtcattcagttcggcaacagtacctgctagatcgtcgtgcgaaaacccagcagattctaaaatgctgagaagtgcttttactttgtcgttcatgattttcctcctacttgtcattttcagactcacggcactattgtagcaaatatttacttacggaaggtaagcttttgtctgctaggtgacgacaaggacacattttccaaacaacccaaaataaaaagccccaaaacgctgatgtaccagcattttaggactaactagaagtaagggaaaatgtcataatggaggtgaggagaatcgaactcctgtccatcacccctgctacatgcagctctacacctatagctgacttatttaaaattcgccgcgatgtcgcgccagccagcaaggctaacacaaggcggctaacctactagtctcttgttaatgcctcaggtggcaacattaaccgtagctcaatcatttgagacccagacccgacccttgagcgaagtcggaaggatcacgctagctggttattaagcagctaaagcgtaagaattttcgttctttgcagttatattaactgttccgttgatgacggagccgagcctccgaggtgcactgcatgtgcgaaaagcaatgtcgagaccattacacccccgattaaggtgcaaacattatgataccacggtataattaagcttgtcaaaatgtttggttttagactggcatcaaattcggatttaagctatttttatggaggcatgtctatgattctacttattgccggatgcatgcaattactgatgggcatccttcttgctgtttttcgaccacgtcatcaatctggtttttggggctacacgtcctatcttgccggggtgaatgccgaaagttttcgcttggcacaacgttggttttgccaagcattgatcatcacaggcgcacttgaagccggtgcgggctggttgatccattttctggcatgggacaatttctttattgtttggctttttttggccgtcatgttgtttctgccaggatttgtctataccgagacgcggttaaagcattatttgcaagcccatgatgcactgccttatgactacgtgtcaccagacgatgcaccgaaaccgcaacgcaaaaaaggctttaaagatctgtgaaatgaggggtacatcatgaaattattaatgatcgaagataacacgagtgtcgccgaaatgatggcgatgttctttcaaaaagagaaatgggaagtcgtcaacgcctatgatggtgaagaaggtcttgctaagtttaaggaagcgccggacagctttgatattattacgcttgacctcaatctgccaaagatggacggcatgcaggtcgcaaaagaaattcgtaaaatcagtcaaactgtgccgttgattatgctcacagcgcgcgatactgaaagtgatcaggtgttgggactggaactcggtgccgacgactatgttaccaagccattttcaccgattacgttgattgcacgtattaaggccctacatcgtcgggctgaggtaggcgccgaagtgggtgctgagcagacaacaagcgagccgcctgacggttttgatgttgaaaccgatcacttcaagctcagtaccaaaacacgtgaagcttatttggatggtaagcaaattgaaggcttaacaccaaaggaatttgatttactgcataccttgtcgaaaagtccgaagcaggttttctcacgtgaacaattactgcaattggtttgggattatgagtattacggtgatgaacgaactgtagatgcccatattaaaaaactacgccaaaaagtcgaaaaagtcggtccgcaaattattcaaactgtttggggcgtcggctacaagtttgatgattcggggcttgatcgatgaaaatgctctaccagcagctgattggctttttctcagtcattatggtgaccttagtgattgtctcgattctgtttattcggtctaccacgaacacggtttgggaaaatggctttaaacagttagagcaatacacggatgttttaaaaaataatgcggttgatgaaaatacttacgtcatcaatgccagatttattcaaaatgctgaagagattttaagcgatcaacacgtgcattttgttatttatgatgccaataacgttgctaaatatcctgtgtcccaaaaaggtcagatgccagcgatcaaggcaagctattggaaaaagctaaagcaaggggcggctgttgccgtcccggagatgatgacgaatccaatcagcggccatgcacaaagcatgacgatctattatcaaccggtttttctgagtgaaaaattactctttgtgattgccgcctttgcgccagttgagcaaattcaaagttcaattagcaaaactgagcataatttgcttatcgcgttcgtactgtcaacgcttgcggcgttcatcatcagttatttcattgcgtcctatcaggtgcggcggattaatcaattacggcgcgcaacgcatcaagtggcagaaggcaattatgatgttgaagtaaaaattaaaagccgcagtcatgatgaagttgcggaactggccgatgattttcgcgacatggtgacctcactaaaagctagtcagcaagaaattcaacggcaggaagatcggcgccggcagtttatggctgatgcggctcatgaaatgcggaccccgctgacaacaatcaatggcttacttgaaggcttggcctatgatgccatccctgaagaaagtaagggaaagagtatcgaattaatgcggaacgaaacgaaccgcttgattcggcttgtcaacgagaaccttgattatgaaaaaattcggacaaatcaaattttgctcagcaaacagacgtttaacgcgcgcacggatcttgataacatcgcggaacagctggcgcagaaatccgaagaggctggtgataagatcacaattgatgccccagcagatctgccgacatatgctgatcatgatcggttcgttcagattcttttcaacattgttcaaaatgcggtccaattcactaaaaatggtcaaatcactataaaagcaaaagtggggtatcatcagactgaatttgccattagcgatactggtattggtatgtccaaggatcagatgaagaatatttgggagcggtattacaaggccgatccatcacgtaaaaacaccaaatatggtgagtccggtttgggcatggcgattgtgcatcagttaatgggacaacacggtggcaccattcatgttgactcgaccctaggcaaaggtacaacctttacgttgaccttcccagatgaagcgacagcgcctaagcaaaagcagccaggagccgatcagcagacctcatcatgaagaagagacaagttcaagcagcgtcaagatacaccagaaaaaggccattaggaccgttcgaaatgatcatcacgctcacgtgaattgcctgattttgttaagcaaaagttttgtcgcgtgtgatggctggcagggcttttacaatgcattagctgcttagccaaaattatataacaaatttggctactgggttgcgtccaaatcctcacaacgacggctttgcatggaaacgtgtataatagaattaataaactaaaaggagacgcatatgaccattcgacgaatacaacaaaatgattttgctgatgtagatgccttgttacatgcagcattcaatgccagcaatcgcggttataacggtgaggcagagctagttgccggactgcggcgtgatcctaattatgattcagcccttgaagttgtggcgatgatggacggtcatttggtcggctacgggctaatgaccgcggccagcattacgccagatgcccatatgcaaggggtggcgctggcaccgttagcagttgcccctgaatatcaaggcggtggcattggggtcgcgattgtgactgaactcgacatgcgagcaactgatttgcggcgtgattttgtcagtgttgtcggcgatcgacaattctttggccgacttggctttcaaaaagcagccaagtacaaactcgatccgcctttcccagtcgtcactgaagaccatttgattaaggaacttgtgcctggtgttttggcaagtgttcgcggcaaggtcaattatccagcaccttttttgactcaggtagcgaattaatcattgagaccaccacattaaaaaggcgctacgatatttggagttgataggcagcttgcctaccagctcctttttctataccatttctatatttgaacgcgcaaaaaggacattacactttctgctcgttcactgtcccgaccaaagaatagagaataggagtttgtgtaatgtcccttacaggtaagtctatccgaatggttctagaaatcaaggaccctaacattatctttacgcaagacgctgtcattgaagaaattcggggcgctaaagcccttgtcttctatgccgaacttaaactccaaccagagcattgccctgcctgtggctttgccagcaaactagttcgttatgggtttgaacgtacctgcgtacttatgcccagttacagctaccgtcccacctatatgaagcttagccgtcagagatttcgttgtgagttgtgccggtcggtctttcagagtgagactgattacgtccgaccgcgtagcaccatcagcaccccagtccgccagatggtgctatttgaagccttcagcaactgttcattaaccgacattgcgcgacgcttccacgtggctgataagaccgtccagcggattattgatgaagaagcggcgaagtataactaccatcaaaagctatggctcccgaagcatctggcttttgatgagttcaaagctaccaacaaaatgagcttcatctggggtgatggcgatcgacaccagattggcgcaattctaccgagccggacggcatacgcaataacgaagtactttgaaggctttccactcagtgtccgccagcaagtgcagaccgtgtcgttagacctgaacgccggctatatcaacctagttccacgtttgtttccaaacgccaagatagttgtggatcggttccatatcgtccagatggtgtcgaccgccctcaacatggtccgtatccaagtaatgaagggtctatctaagcgtagcaaggaataccgattcatgaaacgcgagtggaaaatctttcttaaggacttcaacgaacttgaagcaataaaacccacgtatcacaccagcgtcggctattacgaaacaactgtaaatctggtcgccaagtgcttagacctgagcccggagttccgggcagcatatgaagtctaccaggagattataggagcggttagaaagcgtgatgcgtcagcactcgcagccgcactagagagctatcgatcattaggaaaccgaatggatcagtctatcaaaacgttaaagaagtacaagagacaagtcatcaatgcattacgctatgagtactcaaatggcttccttgagggtattaacggcatcatcaagaagattaagaacactgcgtacggctatacgaattggaacaatttcatcaatcgtatattcctggaacgggtttggttcagagctaagagcagcaaggcagcagcataataaaagcatctagaccaattaaggcctagatgcttcacaaaagatctatcaactctacttgacgaagagccattaaaaaaaggagtcgcgttgttcaaaacgcgactccttttttaattatttttgtttttcctgatccttgtcgtgatgatgagccatgcggattgacccaatacacagaccgccagtgattaaagcacttcccatgagtgtattgtcgctaacatgcggccagcattcaatgaagacgacaaagccaacgatgaccgcgactaccacaaaatgccacgagaaatgatgtggatgatatgtatgctgtaccttcatgtgaaggcccccttataaatgcgttcgcaggcgcagaaacctgtccataaacatttgaaacccaactggtcaaagacccattcatttaagcttcaagtcacggatgttcaggtttctaaacgtgtccgcgcacgctttgtatgaattaactaatactccccgcaatgacagtcctagcctaccgcaaaaacgatcaagattaaaggcacttcacttaaacgctttcaggctcatcaaaatgtcatcatccatctggtcaaaaacgctgctatttttttaaaagaccgtaaaaacggtctttttgcttgactttttttattgcaaaccttttacaagttgacagtgggtttgcagaaatgacaatcactgttacaatatgaacatatctgaacgaatgtctattattcaaggacatttagttttagtcaatcgttttggaggttttagcgtgaagcagttttatattgttgacagttcgatgcttccggaagtcgtcggtaaagtcatagcggcgcgcgcacttctccaaaatggcgaggttaagcaggtgagcgaggccgtcaaacaggtcggcatttcccgtggaacctattataaatacaaagattatgtttttttacccgacccagaaatggcatcgcgtaaagcggtcatctcgttgatgttgcatcacgatcgcggcattttatcagaagttctgacaaccatgtcgcaagcgcaagctagtatcgtgaccatcaaccaaaatattccgatccataattgggctagtgttgtgatgtcatttgatatttcggcactgcagggaacgttagatgatcttgtaaccaaacttggcgacattcgcggtgtcagtgatgtgcatctggtttctgttgaatgagcgccatgattatttggaggctgtatgaaaatagcatttaaactattactctgggtcttagtgaccggtgtgattttatttcccgcgctactgttgattttgtttgtcattgggttgagcgtggtcgtttctggtgccatggcaattagcgctgttgggctggtactcggtatcatttttgtggccttggtgggtctcagtatcatgattccatgcttattgctggtgattcgctttatgactttccgaacagtgaatgttcgttttcaacatcatggtgaacgggtggtattgccggtgacggtcaagttgacgggacggacgatttaccacgcgatttatgaaaatttccgtgcgggtcgacggcgcgggcggcatcttttatcagcctgggggtttgggtttgagacttacttccacgaagacttgcaggcgtatcttgctgatcagattcttgctcagcacggccctgaaatggcggagtcctttgtggttgatgagcggcattcctactcaattgcgtattaacaaaacgaatttaaaataccatccgcaagagtgctgtgccagcgctcttttttcttggctactttttgaaattgacgcgtttattcatcacgccgcggccgccattgaatcacccgatttgattcaggccagcgcatctcttcaaagccgacatattcaatcgtgagttgcgtgtgctgacgaagcaggccaatgaaggtttctaagtctgccagatcatagttgatcaggctgtgtaagggaatggaacgttggcgctgatccttaggttgaacgttcatgaaaaaattgtatcccggtgtataggtttgattgaccagtgatagccagtaacgtgtttgacggcgtcgtttgaaaaggggggttaatcgcgccatcattagcttcaaatctttagtcatagctattgccgccattatgtcctcctactagtgatgcccgttgaatcgccgttccgccatgcatcgcacttttagcgtagatcaagcccttaaagccaaaacgatcgcgaatagtatctagcgtgcgttctaaattagttgctttaatttgttgatcaaccggctcaaagaaattgagttgttcgccggtatctggggctaagcggccggtataaacggcaacgttacgaatgacctcaccatgccagttttgccgaaaaatcagttgcagtgtggcaacaagatcgccgtcccgattcgtcggtaaaattcgtttagtttggtgaaacccgccacgcccgtctttttcactttcagcataggaaaagccgatacctagggaaatttcaccagctcgtttgtgatgatgccgcaaccgtgcggcaacctgttcgccgatttctttaataacgatttcgatttcaacttgattgctataatcgcgcggcagaacctgtgagttgccaatgcttggttcgcgggtgatgacgcgttcgctgatttttgtgcggtcaatgccccatgctagcgcaaataactgcgtgccaatgatgcccagttcttgctttaaggcatacggatttgcgtgagcaagttgtttcattgtcgtgatgcccatacgtgcgagatgcgctgctgttcgttgaccgatactccaaacgtctgtcatattggtgatctgccaaatggtatctggtacagtttgataggagatttgaccaatcaaattaggatcatgttttgcataaacatccagcgcaattttggcttgaagcggattgtcaccgatcccgactgttgtgtagagaccaagtcgatgccgaatagtatgttgaattaattgcgcaactgcacgtggtgttttgccaaagagtcgccatgtgtgcgttaaatcgagaatggattcatcaatggaataaggccacaagtcttcattggcaacaaactcacgaaaaatatcattgatggctagattctttttgatgtaaagattcatgcgtggcggtaccacgatcagatgcttatccacaggcaagtcccgttgacggctaacgttacttttaaggccatatatttttttggccattggcgaagttgccaagatgaggccgccatttgtattctcttgttcggacatgaccacgagaagggttcttaaagggttcagcccgcgttcaatgctttcaactgaagcgtaaaaggatttattgtcaatcaggaaaaccgttcgatgcggttcgtgggaataatcgtaggccatcaaaatcacctctgcaattattatacgaacatacgtttgcataagcaagcataacgtgatttcagcccagaaaaaaaccgctgcgtcaaaaaacgcaacggtttgattgaatcgacgttaagcaattgtttcggttagcgcatgcaaccgccgatatgactgccccatgaagagacgttggacatcatattgctgtggaagaagcccattcccatgccactgaaggcctctaggacaaagaaggctgcaaaaattgccgcgatcacgatcaaggtgaccatcaatggccgccatttttcagaatgtaacatagcaacgaccccctaacaattaaaaacacatgacagcatgtagtataacaccattagataacggaattgggagaaaataaggcggcacgcaccagtcttatttctgaacaaaggggtgttcacctcagtcaagcattagtctcgatcccacttaatcttcagattagtttcaatcaaatcaccatcgtccaatgcgaaaggttcgacgacactgctgccatcatctttggtgaacttgatattcaagatgttgccatcgcgataaacaacttcccacttaccatttgttggcgtgccattgctggtcgccgtataagtaccgtcactgttgaagttgaaagtggcagtgtcgcctgattcccagcgaccgacgacgccatccgttgaatgattatcattgcgctttgaagcatcagaaggatactggcggttcgttttggtcacaccattgtcatcataatcatcatcgtcgtcatcatcatgagattcagatgttgaagaaccgcttgtggcgtcatgcgttggtgtaactgtcttagcagcggttgcggcatccaaggtcagtgcttccggttgccctttaagcgggacgatgacttcacgattgaagtctttcgtacttccttcgtgcgtaccgctcagcttgagggcgtacagaccaggtaattgactggcgatggtataactgccagaacgattttcaggttgaatttgattgccatccatggtgaaagcagcggcgtcaaggttggttttgactgtgacgttggcggtaccaagcttaaccttgtatttcgggaaaagtagcaggtaactgccttgtttgacgacctgaaccatgccattggtttgcttgtccatgatcatggttcgcaaggtgctgcgataaagccgattcttagtcaaacgggcgagcggcttaagatcactttcagtcaatggtgtgccatcgtttgcaatggcaacttcagccatgtcatcggcatctccactagtcatttcatcagccaactcagcgacttgtcgattttgaccatagtacattgatccgccgagataagccgcacctaaaagaacgacaaccgcaccaacaacgatccatggccagcgccggcgtttatgtacttgttgctgcgctggctgggttgaagcagcaactgtcgcagactgagttgcttttggtgcctcggcaggagacgtcgatgctggttcttgggttgattgggcttcaagtcgggctttccgcaaatcaaacccgcagttaggacaaaagtcgtcagttggtttaattggttgaccgcagttgggacaaaattttaaaacatcttgcataagttattcctccaaagttttcttgagtaaggcagcaatctgatcatgaccgcgctggttggggtgaaaagtatcgcgcggaccgttaccagcgaagtcggtgatggctgtaccggcagggcctgtgacgtcatcatggttttgccagatggtcgccagatcggcaactggaacgtgataagtttgaccgatttgtttgaccacagcatcaaattgcaaatcggcggcggcataaggaccatggtttggcgaccaggtcgtcataaggatcaactcggctgttgtttgcttctgcaaggttgccacgatggttgtcaacgcctggcggtaatcagccagcgccgttggtgtggcgccgccaaccgcatcgttcgtcccaaactcgatggtaatcaaatcaggatgctgggcaatcaacgctggcagagcagggacaccaagattagtcgcggtttttcccacctctgcaatcccttcctctgtcaccgtcttgtcagtcaaacggtgtaattggtcagcaaaaagggtggtaaaccggcttgttttactatccgcaaacaaaccaacagagaggctgtcgccaaacggtgcatacacgagcgtcgtttgtgattttgccttcagccgggcgagcatgcttgtctgcttaatcgcagctgaggatcgcgaactaggcgacttgcggctgcgaagcgaagccgctgaactgctcgatttagccactttatgttgtaccccgcagccagctgctaaaatgagcaataaaagaccaaaacccaaccaaaactttttcataacatgccttctccaatgcaatcacgatgcgtcagctaacaaaccgcgtgttcttagctttccagtcttctaatttaataaaaacccagaagccatagatccccaacgtgataattgtcagcaacaaccatttaatccaattgccgaacaagctcacggccgacccaaaaaagtgcatccgatgaccctcaatcacggtatgattgattttccaaccatatagcatggtcaaagaccatggataacaaatgcctagtgtaaaaatcgtgatcaaagtgccaagaatcgtccagccgacataagccaacaagccaccatcaaaaaaagagtgccgcccatatttcgtctccataatcgttgctgcctccaacttgttttctctagtgtagcagaactgataggcagggtggaggaggatgcttgaattgtagcctttgatttattgcccacagccacaacagagaccggtggcaatgcgttttactgccatttgaatagaaagagagagctggcggagcggcgatgggctcagtggtgacattgttcttaaacgggtgggcttcccgttttagaacaaggccagactttgaaaccgcgcactttgcgggttcaaagctgtgcccaccacgttccagcccaatcgccgcggacccagctcggaccacaggtgaagactcacgtcagataggacgagaaaccttgtacatctgattttaaagaggtcatgattgaccactcgctcacgctccctcccaaaatttggtacaataggtcaaggaatttttcacttggtttttctgaaaggacgattcgttaaatggtaatggatgccgcattaaagggtatgaatgataagcaatctgaggcggtgttggcgactgaagggccagtgctgattatggctggtgccggttcaggcaagacacgggtattgactcatcggattgcttatttagttgaagaaaagcacgtcaatccatggaacatccttgccatcacgtttacaaataaggccgcccgtgagatgcgcgagcgggtcggcaagttggttgatgctgagattgcgcgcgatatttgggtatcaacgttccatgcgctctgtgtccgaattttacgaggcgacattgacaagctgggctataaccgtgcctttacgattgctgatcctgctgagcaactgacgctagtgaagcatattttggctgatttcaatcttgatccaaagcgctacgatcctaaatccattttaggtgctatttcgagcgctaaaaatgaactcgtggatccacaaacttatgccaatgagcaggctaacagtcctttcaccaaagttgtggcgcaggtttatgcggaatatcaaaagcgtctgcgcagtgatcaggcattggactttgatgatctcatcatgcagaccatcgtgctttttgaaaaagacaaagaaacactggcattctaccagcgtaagttccgctacattcatgttgacgaatatcaggacactaacgaagcacaataccagctcgtgcatatgttggcagaaggctaccataatttatgtgtggttggtgatgccgaccagagtatttatggctggcgtggtgccaatatgcagaatattttggatttcaaaaaagactatccaaaggcgcaagtcattttgcttgagcagaattatcggtcaactaaaactattttgagtgcggccaatgatgtgattcagaacaaccagaatcgccaagccaaaacgttatggacggaaaatcgcgaaggcgacaagattacctattaccgcgctcaaagcgaaactgatgaagctatttttgtcattcgccgaattgaagcagagatcgctgataatcatcgcaaatatggtgattttgcgattctgtaccgaaccaatgcccagtcgcgggcgattgaagaagcgtttgtgaagtccaatattccatataaaatggttggcgggcataagttctatgatcgcaaggaaattcgcgatgcgctagcgtatttccggttagtggtcaatccggaagacgatatgagttttaatcgaattgtcaatgaaccaaaacgcggtattggcaacacaagcgttgaaaagttagaggcctttgccaatgagcatgactggtccttgctggaagcagcggcgaatgctgaactcagtccgattgctggtaaagctcgcggacagttagctaagttcggtaaaatgatccagcagctgggtacacggcgaaaagatctaaacgtgaccgagatgatgcaggcaattcttgaggatagtggctatttatcaacactgcgagcggcccacaatctggaagccgatacccgcatcgaaaacttagaagaattgctttcggtgacccaaggattcgattcccggtatcagccggaaaatgaagacagcgacattttcgttgattttctggctgaattggcgctgttatcggatcaggatgacgttgaagaagatgcacaagaagttaccttgatgaccttgcacgctgctaaaggactggaatttccggttgtctttttagtggggatggaagaaggactctttccattgagtcgggcttccatggatgaaagcgagctcgaagaggaacggcgcttagcttatgtcggcattacccgcgccaaacagaagctgtatctgtccaatgcctatggccggatgctgtatggtcaacggcaaaacaatcctgctagccgtttcattgaagaaattaatcctgacttgttggaagtcattggcactacccagccaaaaagtgacattccatttattaatcgtactgaccgcgcattcagctccccgtatagccggcacgctgatcaaaaaacagcaacacccgttactgtgcaagccgcgccaacaacaggtgcaggcaaaaccagttgggaagctggcgacaaggtgaagcatcgcaagtgggggactggtaccgtggtgaaagtcaccggtaccggcgatgatcaagaactcgatattgcttttaaagacaacggcatcaaacgactgctagctgcctttgctccgattgtcaaagtggcatcataagcgttcgcagtttgactcagaaatgtcgggatgcatatttttagaggaggctcgctgtgttagcaaaaccagctgcacaattcacacttgaagaagctcaggcggaagtcgaaaagcttcggaagcaactgaatcaatggcgtcttgagtattacaccaaagatgcgccaactgtgaccgataacgtctatgacgatcattatcgcgatttacaggcactcgaggcggcttatcccaagctagtcacgcctgattcgccaactcaagaagtcggcgatgtcattaattcggactttgccaaggtgcaacacccaattccgatgttgtcgatgggcgatgttttttcgttcgaagagctgagtgaatgggatgctcgcatgcaaagcaatgtcggccatccggtggattacaatgttgagttgaaaatcgacgggttggctttatctctgatttatgaaaacggcaaactcgttcaaggctcaacacgtggtgatggtaatgtcggtgaagatgtgaccagaaatgtgttgaccattgcgtcagttcccaagcagttaaagcagccactttcactcgaggtacggggtgaatgttatatgcctaaggcggcgtttgccaagctgaatgcgcggcaggaaactgagggcggcacgccttttgccaatccacgtaacgcggcagctggatcactccgacagttagatgccaaagtcaccgctgctcgagagctggataccttcatttatacgttaattgaaccagagcagtttaacgtgaccacgcagcatgaggcgattgcgtttatgcaggcacttggatttacaacaaatccaagttcagaagtggctggtgacatgcaggcgattgacacctacattaagaagtacaccaccgaccgtgatgcgttgccttatggaattgatgggatcgttttgaaagtgaacgatttggcgctgcaagcgcaactaggtaacaccgttaaagtgccacgctgggaaattgcctacaaattcccacctgaagaagcagagaccgtcattcatgacattgtctggacagttggtcgaaccggtgtggtcacgccgactgccgtgatggacccggttcagcttgctggaaccacagtggcacgggccacgttgcacaacgcggatatgattcgtgataaagatattcgcatcggcgacaccgtcatgttgcacaaagcaggcgacattattcctgaagtttcgcgggtactggttgctaaacgtccagcggatacgccaccggcgccgattccagaggcctgcccgtcatgtggccaaaaactggtccatctcgacgatgaagtagctttgcgttgcatcaacccgatgtgtccggcacaggtccaagagcagctcacccattttgcgtctcgcaacgcgatgaatatcgatggcttaggcccgaagattgtggcacagttgcaggccaaacatctggtaaaagatgtcgctgatttgtatcacctcacagctgcggatctggcgaaattagataagtttaaagaaaaatcaattaataatttgttaagtgcgatcaacaacagtcggcaaaactcggtagaacgcttaatctttgggttgggcattcggcacgttggcggtaaagccgcccgaattctggccgaacatttcggcgatttggatcatctgatgaccgccagtcaagaggcgatcgcagatgtgccaaacatcgggccgaccattgcggaagcgatcgtgacgtattttaaagccgcaacggttcaaaagttgatcactcagttgcgcgaagctgatgttaacctgcgttacaccggaccgaccaaaccagtggtcaaagatagttttgttgcaggtaaaaccgttgtgattaccggtaagtttgccgagttttcgcggccagcactcacgaagcagctagaaggattaggagccaaggtcacaggttcagtttcaaagaaaacggacctcctgatcgctggcgacgcggctggcagtaagttggcaaaggcacaaagcttgaatgtcccaatcatgaatgagacggaattgctggcgaatttgaaggattgaggaacatcaatgaagaaatttttaacgttaactttgctggctggggctgcggtgttgttagcagcctgtggcaagttgaattttgacagtggcagcagcagtactagtggcacaaaaaccggtagttaccaaaccaccggcacggttgataatagtatgtatcaaggcgttatcaaaaacggacgttatcagacgagcagcgcccgtggtttgacgctgcagcagaatgatcaaggcgagaacaacttcaatattaaaagtatggaaagtggtctcgaaaacctagccaaagcacagtttccaactgacaaatatagttttgaagaaggtcagttgttaagtacggcaaccgctaaaagttggctgaaacgtgaagccaaggacaacaaagacggacttaatccggttgataatggcaaaactgatcctgatacccgcaatccgatttatttgcagcagattttagagcaggattttatggtgcaagacggtaatagtatgaagctgggcggaatcgcaattgcgcttgggatgaataaggttgattactatacaaagacggaatacggtgcccagtatcaaaccgaaatttccgatgaggcgatcaagaaacaaggtgaagcaatcgctgccaaggtcgtcgctcgtttacgcgccatgagtaaagtgccgaataatattccgatcattgtcggtatctacaagaatgctgaacaagatagcctcgttggcggtgtttataccgagcagacaaccagtaaaaccggcaccaatttaggcgattggaagaagcttgatcaacagaatgaagtgctgccagtggtgagcgatcataaggcgattaacagtaccgtggccaatgacttttcgaattttacgaaccaagtgaagggcttcttcccgactttagctgggattacggcacaggcgcattatgaaggtggtaatctagccggcatgaacattacggttaacacacagttttatgggttgaccgaaattcagagctttacgcaatatatttcaacggcggctagcaagtatttaccttctggcgtgccgattgagatcacgattcagagcacgcaaggcatgcaggcctttgtatcgcgaagttctggcgacaaaggcttttatacccatgtattcgggagttattagccgaatctatggtaaactacgaatgataatgaaactgaaagcggggatagcatgatttctaaagacagtgttgcgcatgtggcaggattggccaagttgcaattttctgaaacggaactggagaaatacaccagccagctctccgagattctcgatatggttgaacaactagaaagtgttccgacgcaagatgtgccggtaactactcagagtattcatctggaaaatgtgatgcgagcggatgtcgctaagccaggcgaaccggtagcggacttgttgaaaaatgtgccaaccaagaagggcactttgatccaagttccagcgatcatcgataaagaggaggactagcgcgtggattactttaaaaccagtatcgatcaattgcatgagcagttacgctccggcaaggtgaccagcagtcaattggttgacgagacattggccggcatcaaccagttggatgctgaagtagatgccttcttagcgctgaatgctgatggcgccaaggaaaaggctgctgcagtagatgcagccggtattgctgacgatcaaccactagccggtgtgccaattgctatcaaagacaacattgtcaccaaaggcgttgtcacgacggcagcgtccaagatgcttgccaacttcaatccgatttatgatgcgaccgttatgcaaaagcttgatgcagccggtgcgatcaatgttggtaaaaccaacatggacgaattcgcaatgggctcgtcaacagaaaactccgcttttaaaacgactaaaaatgcttgggatcacacgcgcgttcccggtgggtcgtcaggcggctccgcggcagctgtcgcagctggtgaagtgattgccgcactgggcagtgatacaggcggttccattcgtcagcctgctgcttttaacggcatcgtcggggtcaaaccgacatacggccgcgtttctcgctggggtttgattgcctttagttccagccttgatcagatcggaacgctgactcgacatgttaaagacgctgcgcagttgctgaatgtgattgctggtcatgatgaacgtgatagcaccacagcggacacacccgtaccggactttaccgccaaaatcggtcaggatatcaaggggatgaagatcgctttgccaaaggaatacttaggcaaaggggttgacccagcggttgcggacaagattaaagcagctgccaagcagttcgaagacatgggcgcgacggtgacagaagtgtcactgccacatacgcaatatgcggtgccatcttactacatcatcgccagctccgaagccagctccaatctgcagcgctttgatggcattcgttatggtttccgcgccaaggatgtcaaaaatattgaggatgtttatgttcgttctcgatccgaaggttttggcccagaagtcaagcgacgtatcatgctgggcaccttcagtttgtcagccggtttttatgatgcatacttcaaaaaggcagggcaggttcgaactttgattacccgtgactttgaagatgtcttcaaagattatgatctgattattggaccgacaaccccaaccgttgcgttcaaaattggcgaaaaagtcaccgatccagttaccatgtacatgaacgacattttgacaattccggtcaatcttgccggcttaccggcggcatccgtgccagctggtttcgttgatggcatgccagtcggcttacagctgatcggcaaacattttgacgaaagcgcgatcttccaagttgctgcggcttttgaagcacaaaacgactacttagcacagatcccggggggcaagtaagatgaactttgaaacaacaatcgggcttgaagtccacgttgagttgaaaaccaaatcgaaaatgttctcaccatcacctgtcacttatggtcaggaacccaacacccagacaaacgtgattgactggggattcccaggcgttttgccgagcatcaatcgcggagcctatcaacttggcatcatggtggggctggcattgcatgctgacatcacgcgtttgactcattttgatcggaaaaactatttctatcctgacaaccctaaagcttatcaaatcacccaaagtgagaagcctttgggcaccaatggctgggtggaaattgaagttgacggtaagaagaagaagattggtatcgcagaactgcatgttgaagaagatgccgggaagaaccagcacgaagacgatggttattcctatgttgatttgaaccgtcaaggcacaccgctggtcgaaattgtttccaaaccggatatcaccagtccagaagaagcttatgcttatctggaaaccttgcgccaaatcgttcagttcacaggggcttcggacgttaagatggaagaaggctctatgcgggttgataccaatttgtcagtgcgaccaattggacaggaacattttggtaccaagaccgaaatcaagaacctgaactccttcgtgcatgttcgcgatggcctcgcatttgaagaaaaacggcagcaggctgtacttttgagtggcggtgaagtgcgtcaggaaacccggcgctgggatccagatgctaaagaaacgcttctgatgcgggttaaggaaggcgccgatgattatcgttacttccctgaaccagacctgccaccagtggctgtttcccagaaatggattgacgacattcaggcctcgttaccgcaaccgccagcagagcggcggcagcgttacatcgaagactggggaatcccagcttatgatgccggtgtcttgacgcagacgaaggaaatgtcagatttcttcgaagcaactgtggcgcaaggcgctgatgccaagcaagcgtctaactggctgatgggtgaggtttccggtttcttgaatgcccaacacgttgaactggggcaagttgccttgacgccagcgcatttggcaggcatgatcaagcttattggtgatggcacgatttccagtaaaatggccaaaaaggtctttaaggaaatcattcaacatgatactgatccggataagtgggtccatgaaaaaggtctgatccaactttccgatccggctaaattgaccccgattattgacgaaattctcgataataaccagcaaagtatcgatgacttcaaagctggtaaggaccgggcaattggcttcctagttggtcagatcatgaaacaaacacatggtcaggcaaaccctaaagtggtcaaccagattttgatggctgagattaagcaacgataagtgatactgactatctagcaattcagttcggataatagcctcgacatgtagacaatgttctttgttgtttacatgccgaggctattgcgcaaattgctagtcttgctattgtggcagcagatgggaagtaccaagaagaataggctcaaaagttgctcatgaatgaagcttttgagcaagacattgacgattcacgattatgagaaagactgtttccgccagcaacgggcctgcagtccagtattgttaaaacgtttaaggagcattgaccgatgagaaaacgggcgcgtttgatatacaaccctacatccggcaacgaaggtttaaagcgcttcgtccccgacattttggatatcatggaacaggcaggatatgaaagttcaacctttcaaacaaccccgaagcctttttctgcacgtgaagaagcaaagcgtgccactgaagcgggtttcgacttaattgtcgctgctggtggcgatggtacgattaatgaagtggttaatgggatcgcaccagctaaaaaacgccccaaaatggcgattattccagcagggacgaccaatgactacgcgcgtgctttgcggatttcgcgggatgatccggttgaggcggcccaagtgattctcaaaggccaaacccttgcgatggatattggccaagccaatcatcattattttatgaacatcgcggctggtggtttgttgagcgaactcacttattctgtgccgtctgaagttaaatctatttttggctattttgcctatgtgattaaaggcgccgagatgttaccagcggtgcggacggtgccgatgaagctggaatatgatggcggggtttatgatggacccgccagcatgtttttcctcggccttaccaattctgtgggcggttttgagcagatcgtgccggatgctgcacttggtgatggcaagttctccttaattattgttaaaacagcgaacatggcgaatttgctgaagctaatggcgcttgtcttcaatggtggtcgccacgtggatgatcccaatattatctatacaaagactaaaaagttgcgggtgaaggccggcggagacgatccgttgaaaattaaccttgatggtgaatacggcggcgatgcgccgatgacgtttattaatttgaagcaacatattgccatgtatgctaatctagacgagatcccgaccaagaatcttggtacggacgcgcagaagcagaaggactacatggccgaagtcgaatccatttctcatcaagatattgatggtgatggacagatcggctcacaagacgaaaaggatgactaatttggcccaaccagctgtaaccaagaaccaagatctggaagttaccattcaagatctcacttatgaagggatgggcgttgccaaggttgacggctttccgcttttcattgaagatgccctgcctggcgaaaaaatgcaggtgcatgtcctcaaaacgcagaagcaatatggctttgccaaagttgtcaaacgattgagcgactcaccggatcgtgttcccggtgcagatagcacttatatccgtacggggattgcgccactgtcgatcttggcatatccggcacaattgcaatttaagcagaaacaaattcaagaactttataaaaaagcgcatcttgatattgcggtgctgccgaccatcgggatgacgaatcctttaggctatcgcaacaaggcgcaagtaccggttcgtaccgtgaatggcgaactgcaaactggcttttataaaaaacacagccacgacctcgtaccaattgaagactttctgattcaagatccgaaaattgaccaagccattgtggtggtgcgtgatcttttacgaaaataccatgtgccagcttatgatgaacgcgctaataaaggcgttattcgtaacatcatggtgcgccggggccattatacgaagcagatgatgattgtcttggtgtcacaaacttggcaagtgccgcatctcaaagatattgtcgaagagatcaccttagcattaccagaagtaacgagtgtggttgtgaacttgaatgacaaacgaaccaacgtcattctaggccgcaagtcacgaaccatttacggcgaggactatttgctggataagttgctaggcagtgaattccagatctcgccagtcagtttttatcaggttaatccggttcagactgaggtgctttacaaaaaggccattgaggctgctggtctgactggtaaggaaaatgtgatcgatgcttattcaggtatcgggacgatttccttgacgatggcacgtcatgccaaacatgtttacggcgtcgaagtggttgaacctgctgtgcgcgatgcacgggcaaacgcggtgcgcaatcacatcgataatgtcacctttgaagtcggcaaggcggaggaggtcatccaacgctggaaagacaacgaactgccagtggatgtgctcatggtcgatccgccgcgcaaaggactggataaaagtttcatcgacgctgtcggttatatgaagccgccaaagatcgtctatgtgtcctgcaaccccgcgactttggcgcgggatttgcagctgctagccgcctttggctacacagcaaaggaaacccagccagtggacatgttcccgcagacgcagcatattgagagtattacggcgttgacgttggcgaagtaagactgcacaactatcatggcgcaactcaaagaggcacccgcacatcaattgattgctgcgggtgcctctttttgactgtagcaggtatgaatatctgttgattcagtatcagttctatttcagttgagatttcgccttagtccgagctggctccgcggcgattgggctggaacgtggtgggcacgacttcaagcccgcaaagcccgcggtcttgaagctcggccttggtctaagcggagaaaaccactccactaagaccaatctcaccactgagcccatcgccgctccgccagctctcatgattctattttagaacacgatcagcatgtcgatcttattgttgattgaggctcgtatttggcacaagcactgactgaacgacaagatcttgattctttgtgagtttgcagttgtgtccaccactcaagcttcgcagtcggcacccctgaattgccgcggaaccagctcgaacttttacactaggcttttattttgggcaaatcatgataacaccctaaatatttgctcattcaagttgctataatagggccatttcccttatgatcagtagcagtgacaagaaatgggggagtatggtgcagcaaaagactttagcaatgaaatggttatttctgggttcgttgattacgaataccgggatcagcctgatctggccgttaacaacgatttatatgcatgaatatttaggtgaaccactaacggttgcagggattgttctttttgctaattccatgtttatggtgatcggtaacagtttcggtgggtggttatttgatcattggcagccatatgggacagttcttgctggtattggcctgaatctttttgcgaccggtatgctgattttcttccatggatggccggcttatccactgctgctagttgtgtccggtcttggcagcggtatcacaacgacggcgattaattcctatgcgactcggattcagaataaacgaccgagtgtcgtgttcaatattctctactttacatcgaatctagggttggttatcggcactttaattgtcggatttgtgctgccttatggtattggcgttgttttcgctttggcaactggcttatttgccttatttttagtggttgctttgttgcattatcgaattgataaagtggcgattgcgactgcgaccacgcaaactgttagcagcgagcgcaacccagccaagccgcggttagtcatgttgatggtgaccttatttgtgacctggctaatgtatgagcaatggcagagtaatatttctgctttcatgttaggcgaaggtttgacgattaaggattatagtttcttgtggacgattaatgccttactgattgtgctattccagccaattttgacggcttttgatcgctggttattacaacacatacgcttgcgtttgattggcggatttgtcttgtttgccggatcatttttgcttttgttgaacggttcaggacagtatataacgttcatcgtggcgatgattgttttaaccatgggtgaagtcttggccttaccagcagtctcgacttatgtcaccttgtttacgccattggcacagcaagggcgttatcagggattgattcaaggatttgcttcagctggtcgcgcattgggtccgttgttaggagcaatggtgattgagggcaccggcagctatcagttgttgtttgtcggtgccacaggcttaattttgttggcggctttgggttttgccttcagtgttcgccagagtattccggccctgaacgatccattgcacccagttacccaccagcagtcgtgaaggctgaaaagaatcgttcgaggggattatgaaaaagagaggggcttttgatttgcgttatcgactgattttaagtgacattgacgggacgctgctgaattcaaatcaccagttgaccgatgaagttaaaacggccatcaaggaatacgcggctgctggcggaacctttgtgctggcttctgcgcggccgcctttggccatgaccgctttggcacatcagatgggtctcgacgtgccacttgccagtctcaacggcgccgtcatttgcaaaccgcaacatggcgatttaaaaatcctgtccgcaacgccttgggccgctggcattggtagccaagcatacgaagcgttagctaaactggcactcagtctgaatattttcagtggcgcgcattggtatgtgaacgtggtggatgcgtgggtccaacaagaagccgcaatcacaggctttggcgcagaaactgcgcctatggaacaaatgctggcggaaggattgccagtgcataaaatgctgtgcatgggtgagcctgctgtggttgatcgcgcggaagccatcattcttgcccatccagagtggcaattggtcgctagccgttcgaaacgaacctatctagaaattgtgcggcaaggcgtgtcaaaagaagccgctcttcgccaactcagtgacttgtttgccatccccatgactgagacgatggcgttgggcgatggtgaaaatgatttgccaatgttaaaaactgctgcacttggggtgaccttggccaatgggttgcctgtggtattagatgcaattaaaactgttgtccctgacaacgatcatgatggtgcagcagtcgccatcagaaaatatgcgatggccaaagcataatcaaaaaggcgccttgacaggattcaattttgtcgaggcgtctttttattctgtataaaatagttttaaacgaatctatttagtctttcaaagcctcaacagcatgttcaagctgctgcttttgagcatcggaaatctccggatattttagcggcaaagcggtgacttcttgattgataatctgcgaaacaatcagccgtgaataccatttatcgtcagatggaatgatgaaccaaggattggctttagttgccgtgttctgaatagcctcttgataggctttttgataatcatcccagtagcggcgttccttaatatcagccagtgaaaacttccaattcttttccggaacctcgatacgcttaaggaatcgattcttttgttccgccttggaaaggtgcaggaaaaatttcaaaattaaaatcccgttgcgccgtgcgtaagcttccaaagctttaatatcattgaaccgttcagcccaaagactatcggaaacgtcctgaacactgtcgatactaggcaggttttccttgagtaacaattcgggatggacgcggtcaacgaggacttcctcatattgcgagcggttgaaaactgttaattcgccgccagcggggaaggccttgtgaattcgccacaaaaaatcatgatctagctccagctcagtcggcactttgaacgagacaacagaagtgccttgtggattaaccccagacatcacatgctcgatcatactgtcttttccggcagcatccatgccttggaaaatgatcaaaacactgtactgtttttgcgcggctaaatgttgctgcacttttgataatgttttgatgttattctcaatatctgctttaatttgatcttttttatttttaaaactatctggcggtgtggtcgtgaagcctttcatatcaaacttgcctttaccgtcaaaccgatattgttctaatgccatctcatcaccctctctgtcttattgcttttaagatagaagtttcaaggacattgtgcaagcaattgacgcgcttgcttagtcaaactatgcttgcattatcgcatttaaaaaccgcaggagcagcatcggattttggttcgacgaatgcgcttaaaaggaggaattttgatgtcattaccacgtattcaagatgatttatatatggcggtcaacgggacttggcagcagaccacggtgatcccgcctgacaaaagcgtcgtgagtgctgacagtgatctaactgatagcattcgaatcaagttggtagccgatttgaagaaaataaacgcggcaccacaagccgccgattcaccactgcaaaatgccgcacgactatttgctaaggctaatgataaagttcgacgcaaccaactcggcatgacaccggttcgtgcacggctggataaaattgctgggcttaaaacgctggcccagtttcgtgcagcactgccaaaactactagcggagcaatatgtgttgccagtaagcccgtacgttgatgctgatatgcacgatgcggctcacaatattttgaatcttggtggtccggccacgattttacctgacgctgccatgtatcaaaccgatgatgcagagaatgcggcagatttagctgcatggtcgaaaatggtcgcgacgcttttgggtgaggccggttttgaccagacagcacaagcgcactatgtggcggcggctaaaagctttgatcgccgattggctgcgttcattccggcaaatgtcgattttgccgttgatagcacctttgacaatccgctaacctggactgaatttgtagaagatgctggtttcttaggcattcccgaagctttggctgctaaaatgccgcagacaccgacgaaggtcaacgccgtggtgcctgcttatctgccgcatctgtcgacattaatcaccgaagcaaactatccagaatggcaagcatggatgctgattagcgaactattggcttgtgctgattatttaagcgatgatagccgccaacttgctggtcaatatgaccgttttttggctggacagcctgagcccgaagcttgggaaaagcatgcttttggagttgccaacgactattttgatgatgcaattggtcagtactatggccagacttattttggcgcggatgcgaaagcggatattaccgcgatggtcaaggaaattttgcaacaatatcaggttcaacttgaacacaatacttggttaagcccagcgaccaagcagaaggctatccgcaaattagcgactatgaaaattaaaatgggttatccagatcaacttttcccgctttacgcgaccctgcatgtcgagccagaggctgatttactgccgaccattttgcaattgagccagcagacgcaagacttttggcttcagcaggtgggtcagccagtggatcgcaatgtttgggggatgccggggcaccttgtgaatgcctgctacgatccgatgaaaaatgacatcaccttcccagccggaattttacagccgccatactactcactgaactggacccgagcgcaaaatcttggcggtaccggtgctaccatcggtcacgagatttcacattcgttcgataataatggcgccttgtatgatgagtacggcacgttaaataattggtggacggttgaggacaaacaagccttcgacaagttagtgacagctattgcggatcagtttgacggtttattgtatgaaggcgtcaaagtgaatggccgactgacggttagcgaaaacatcgccgataatgccggcatggaggtggcgttggacttgttaggggattcggctgacccgaaagtgctgcaagacttctttattgcctatgctcgttcctgggcgaccaaaatgcggccagagcgcgctaaaacggtgttgcggcaagatgtccatgccccggcgaccttgcgggttaatgtccctgtgcaaaactttgaggcgtggtatcaagctttcgatgtacagccgaccgatggtatgtatcgactgcccgcaaagcgcgtcacgatttggcgtcggtagcatttaaacacatttgttttaaataaaacagatattagtaggcctatcttgtccctgaaatcgcctcataacgctgtgtgtcagttattagttgtctttaaatctaaaatgaaactgagatgatcaccatgagcgccagccgtcgttggttgattttgattgcaacttcaattgtgtcctttatggctacattggatgccagcatcgtcaatattgctttgccctacattgcccgggagctgaaggtgccgatgagcaccgtcgaacttgtcacatcagtttatatgattgcgatttgtgtcctgcttattttctgggggaagttgtctgacagcgtgggtcggatctggttgtttcagttggggaccattttgtttgcactaggctcgcttttttgcggactatccatgaccttaccatggttattaacggcccgattgattcaagccacaggtgccgcgatgacgatggcgactaattttggcattatcaccgccatttttccgatgaatcagcatggtcgcgcgctcggggtcaacagtgccttgttgcaactgggcaatatcgctggtcccggtattggcggcggggtgttggctgttttaagctggcattggatctttttgattaatgttccggttgcgctggtggcgtttttaattggcgtgctggtttttccaaggcagcggccgtccttggcgggtgcccacatggattggccgggatatggcagttattcggtaatcattttgggctttttcatcacggtgttctgggcacaaacagccggactgtcgtgggtgacgctgttaccagggatgcttgcgttcgtcgctcttgtggcttttgtgcagattgagcgatatgcatctgacccgctgattccgtttgccattttcaaaaatccgggtttcacgattggtattctgactgcgatgatcgtctatatgctcggctattttaatagcgtgatcatgccgttttatctggaagaaacattaggcttgagtgcgttaacggcgggcttttgtatgatggcaattccggcggccaatgttatcagtgcgccaattggcgggaatctgggcgatcatttcggagcagaacgggtgtctttcttcgcgctgtttctctggtgtgtgccgatggggttgtttgccgcggcaaccccgaactggccgttgggttggatcgtgtttggcctcgcgtggtcaggattggccaatggcgcttttcaaaacaatccgatgatgatggacaatgtcgcgccgaagtttcaaggactggcggggtccatggccgcacttggccgtaatttggggatgacaatcggtgttgccttggtgacaagcttgttgtacctgaatatgagtacgcaggctggtcggtacattcatgattatccgcatggccatccccagtggtttatctatggcatgcaccgcagctatgattttgctctgctactcttattgctagctgtgctgctgttaggctggttgaacctgcatcggctgcacgagcgtaaacagtcgttaagttgaaaattaaaaaaagagacaagtgctgcgaccgattatcaagcgaaaacgcatggtaaatagccgaaaacttgtctcttttttcagattaatctttgccagcacgataataatgaatccagccagtttcgcggacgccaagctgatcatacagatgctgggcgccatgattgctgatccgtgtttgccaactgcagcctgcataaccgcgctcatcagccagttgaaaggcagcctgcatcaattgtcgggccaaaccgtggcggcgaaacttaggggcgacataaacatcgttgatgatcaacaacggcttgagcgtgcgggtgtcaaaactacgataaagaatcgcaaagccgaccagttgctggtccaactcagccacaagcaaagcccctaatgtggcatcagtccgtagctgattcagatgagcagccatggcactttcatcaatcgtaagtgggacagggctgtcatgataataaccttgaacgagtgataataaaggcgagatgtcgttggtgatggcagggcgaatggacattggaaaaacctccttggccataatgttgtcctattttaccttgaagtacgcctaattagcaccttttcatgcttgattgactggcttttggacattctgaatagctaccagacagactaaaaaaagaatgatttgccatatataggcaaatcattcttcgctctcataaatagtttgttggaatttaaagattgcagcatttggcatggcaaggaagttttagcctagcacttcctatgattatttgggctctgacaaattgtaggtttcagaagttatcgttcagcctgagagacagtcattgccgatcgtcagtagccatcgagaagaccgcgacacaaccaaagccggtgtggctggcgatggtggggccgatgttgccgacttgcagcggtgtttcaggtgaggcggcatgcaatcggtctttcacgaagttggcggcgtcataatcgcctgacgttgaaatgatgacccggtgcgtcgggttggctttaacagccttcagtgtttcatcagttaagtcgatcagtgaccgttttcgggcgcggactttgcgcacaacgcgaagtttcccagcagtatcgacgtccataaccggcttaatattcagcatcgttccaagggctgctgatgtccgcgaaacgcggccgccatgatacagaaaatctagcttatcaacggtgaaccacatccgataatgcaaccgatgatctgtcagccattgcgctaactcagcaatcggcatgccagcatcgcgtttatcaatcgcgtccaacacaaattggccttcccccgcgcaagcggctaatgtgtcgattaaataaatttgggcatcaggatgcttttctaacaacatcgctttagcctgtgttgcagaatcaaacgtaccgcttaaaccactggagaaaccaatgtatagaatcggtgttttggcttcaacataaggtgtgaagaaatccacaaattggccaacgttgacctgtgtcgttgttggcatcacattttgcttaagctgctggtaaaaggcattgatatcgtatttatcttcgccaagatcgtcttcgtattcctgaccatcaattgtaaaatgcattgagacaaaatccacatgatgatcgtgtaatgtttgatagggtaagtcgcagcaagaatcggttaaaagctggtacattaggttcacctctcgttgcccgtggttagccacggggtatttccatcaatgttacgctgttttatctatttctgaaagtgccgcacggcttttcaaacatagcgagtgttttttaacgcctaaaaacaagagctagttgcaaatcattggccaacaacggcctgttaagacggcattttgtctagcagaaggaaaaagctgactttttgcccaaaaaagccgaatagcagtcatcgtgctattcggctgtgaccggatcagttattgtcggtagtcttcttttggttaaataaggtaccgactgctgggatgctaccgagagaatcaatggcagtgcttggcagcacaactgtgttagcggtgccctttgccagcgcttcaagtgcttcgacattcttgtattgcaagtacagattgccgttatcaatcaggccggcattaatcgaattgatctgatctttgacggcatcggcaatgagtcgctgactttcagcatgaccttgcgcctgcaaaatctgagtttgtttgttggcttcggcttcaagaatagccgattgtttttcaccttcagctttggcaatggcagcctgtttgtggccttcagcttccatgatgttggcttccttttcacgagaagcacgcaacagtttgttcatggaatcctgaatcgtggcgtcaacttggatggaatcgatgttcacccgatcaacattcaggccgtaaccagcagtcgtttcagcaatttgctggaacagcgtttggttaatcgtttcggttccgttcaagacatcgtttaaatccatattgccgataataccacgcaagttagcgcgggtatcttgcaccatagaaagaacggaatccttgttttggtaaacataagcattaacgttggtaatatgatatttcaatgtttcggaaatgcggacgacaacattatctttggtaatgacttcctgttcgtcaaccttcaacggaatttgcttcatgttgacaatttcggtaatccgataaattagcggtggcaccatgtgaaaaccaggctctagggtcgccacatatttacccaaccgttccacaatgccgacttcaccagtatggatgatggcaacgctggagaaaagaatggcaacgacaatgactaggacaacaacaattaacgagatcaaaataatgctattcataaaaatcactccttcaaaacatctaaccagatgtctatgaatttctactgatacgggtgacatgtattaggaacttggcgtggcttaataatgcaaagcatgttccggttttaccacgctgagatacaacggcgaaatagcgttgacaacgaccttgtcgccagcggctgcatcatcttggactcgataatgataatgaatgccataaagggtgatttcgccactcgcggccgaagttggcaacgtaaaaatcgttcctaagagccgttcatcaagcatttatccgtctccttcccagttccgcgattgcgtttggtggaagcctcatcagctttgcaaagcaatcgctatcacacgctaattctaaagcacgggtgagggaaagacaacgatgacgacttcaaaaagcaagttatttgcttatgttggataaaattactattgtttttgctcgcttctattcttattggcctttacttaacagactgtgacgttgataaaaccaaatttcgcgaaaatgatcgactttgctacaatggaaaaaaagagcgtgagctgacccgattagaaaccggcgtgtaagcggcgtcaagcatgatggccgcacttggggccattgcgcttgaggtccttacacgtagatttctgggtccgcgatcgcgtttaaaaagagcgtgagctggcgcgggtagcaaccggagcataagcggcttggtcgttgctgccaaggttcttatgtggaggatgatgcgccagtgaaggcgtttatacgaggaggggacactgtgcgcagtcgggtcatttatgctgatacctatcgcaaacgtcatcaaagacgcttatttttgctggccgttttaatcatcgctttgggcgcactgtttgtttggtggcatcagcgcaacccccgccctgatccgcagacctatcccgtgttgggcgtgcgtcttgaccaaaccgatggggtgcaggattttgacagtttgcgcagcagcaaagtcagttttgtctatctcaaagcgactgaaggcagcagctattttgatgataattttaatacgaattttaatcaggcagctggcagtcgactgagcatcggcatttaccatgggttcagctttgaaacgacaccccaagcccaagctgcccaattcacgcgccaagtcggccaaaatatcggtgatttaccgattggcatttacttaagctattacactgaaaagaagccaagcacacaatggctgacaattcagttacaaacttttgtcacattggtgcagcaacattatcatcgccaagtgttgctgatgggtagcccaagtattttaaaagctgtccaaaaagtcgacccgcaagcaccacgctgggttgtaagcgacaagaagccgacaacgagcagcggtttctggcaatatacgtctggcgcccggttgccgaatggaccgcacgcagattaccgcgctgccgtatttatgggggatcgggcggcctttttaaaactgtctcagcagatagtcaattaacgtcaaacacgggaattgtcagctaatcataatttttgtggctgtatatgacaaaagtgttcgttgattgttcgcgaaaagccatgtcaaccttgacaccaatgcggcataatagttgcgaggtgaaactggatgaagaaagttttgatcggccttgttgtgctgattgtgctggtatttggcggcttgaaaatttttgaaatcacaaattatggtggcacgacttattacacgaagatcacaaacgctggtcaacaggccactgaccatgatcaagatggtaataaatacaccatctacgcctacgacttgcctggctatgatgaaaaaggcagtttgcagcagctgaagttcaatgctaatcaagaccgaccacttaaaatgaatgcttatttgaaagtgatatacaatgataaaaaaggcgtcactgattggcagcgtgtcccgcgagcagaggtgccaaaagcggcgctggcaaagttggactagtcaataaggtgccaaaacgtttcatagacgtgaaggttaattcaactaaataaaaacggctgattttccgtattggaaaatcagccgttttttgatcgctcgtagataacccagcagaatttacagatgacagtgccaagattgagccacatctagccaaagattacagcgtttggcacggcaaaaatctgttgatcaacttctgatgactttaaacactcggaacaataatcgcataagtggcatcttcagcctcgtcgtagatcgtttgcggaccattatcgtcggccgtgatgaccaacttatagccgtaatggtcgagaaaagtcagctcatggatggtgatgccgacgacttgaccgggaagcactttgttgtcgattgcgatctgcagttgtggcgagatcgccagcgagtgggtcttgttggtttgctcatcgagaaatgcaaaattccccgtaaaattcttcgccaatgccaatgcaggattggctgccttggtttgcgactcctgatgatgaccccgatgcgcgagtgcatgtttcagcccgcgtaaaaaactcgccatgttattcgacctcccattttttcattacattaagtctaccatgactttttcctttagtgattacagtgatgctgtttttctgttactgggctgttacaataatggtaagcggttcagagacttgtcaaaaatactttgttttgaaaagaatgacggcactgaatcgggataagcgtgcgtgatgacgcttgatgattgaccgtgtgaattgaaggccgccagtttatgaaggccacggcttaggcggtttcgcggtgtctggcatgtgcatcagtacgttaaaaaacagagcacgattcagccagtttctgagctgaatggcgtgtctgaaaagggggatttgccatgttaaaactcggtgtgattggaacaggttggatcaccaagcaattcgtggcggcagcgatggcgacgaaagcttatcagctcaccgctgtttattcgcgacatcaggaaagcgcgcaatcatttattgacagcacggcaccagctactgcttatacgacgatggatgcttttcttggcagtgatatcgatgttgtttacattgccagtccaaatagtttgcatgcgtctcaagcgttggcagcgttagacgccgataagcatgtgatcgtggagaaaccattggttgccacgaccatggagtttgaaaagttggacgaagcgttgcggaagaaaccttctttatatctgtttgaggcagcgcgtcacgtgtatgaacataactttgaagtcgtcaatgaattcacccacagtcaaccggttgatggggccaccttaacgtatatgaagtattcgtcaaaatacgatgcctttttagctggcaagttgccgaatgtgtttaatcctgaatttgccggcggcgctttaatggacctcggtatttaccttgtatatgatgcgattgcatggtttggtgtaccggagaatgccgtttatttgccgcattttctcaaaagcgggattgacggcgatggcgttgctcgtctcgactatggtaagtttgcggtgacattgatcacgggtaaaacgactaatagcgagttgccgtcagaaatttattctggcaagcaaacattgatgatggacaacgctgctgagctggagaccgttaagctcggtgatcaagtgctgagcacagaaaagttggctaatccgatggaagctgaggcagcctattttgcaaaagcaattgtcgacaaggaccgcaacgcttttgacaaggcatggcagctcgccaaagaggttcatcaggtcatgtcaattctgcggacctccgcaaatctggatttttagtgaggacaatattgtgacaattgcaaccccgttccaaaaacgctggcaagcagccggctatactgaacagacgccgattcaaaccgccgtgtatcaaccgctgaaagccgatgaagatgttgttgggcttgctccaacaggctcagggaaaacattagcttttggcttaccactacttgaaaaaatggtaccaggcgatggcttacaactcttaattttggcaccatcacaagagttggcgattcaaacccgtgatgtgctcacaccttacgccaaagatattggtatcaccgtgcaaggcgttattggctcggcgaatgtcaaacgtcagctcgataggctaaaagaaaatccagaagtcgttgttgcaacggcgggtcgcttattggaactgattcagtcgcgtaagttgaaacttgatgggttgcaaacgctggtcgttgatgaagctgatgaaatgttgcgtgatccaggatttgatcaggttcgagagattgcggcagcagcacccgcggaagcacaattggcctttttctcggccacgccaagtccttattttaaggagctgcataagtggtttggtaaaacaccagacatcattgatgttcgggcaattgatcgaacccgtggcgaagtcaggcatctgtttttgcagacggatcgggcgcatcaggttgattggttacgcaccttagcccataccgatggcttcaaagccttggtcttcttcaatcaaaattcgtccttggaacgcgtggcggggatcttgcgtcatcaggcggttcgctttgcagtcttgtcacgcgaaggccggcaaacggttcgacagaaggcattgactgattttcggcgcggacgaatcacgctcttgctggtgaccgatatggcagggcgcggattggatattcctaagttgccggctgtggtaaactttgaaccaccgaagcgcgcggaagtttacattcatcgggctgggcggactggccggatgggtgaagcaggtctggttgtgaccttgggggatgatcatgatcgccgcgacctcagcaagctggtaccgcagtatcatattcatcgcggctatatgtctgagggcaagcttgtggacacgccgccagctaaaaaagtgtccgaggcgtcggcaccaacgacggttgaaaagcctgcatcgccagtcgccaagcagcagccagttaagccagaagtggcgcaagaaccagctgttcgtccgcgccgcaagcataagaaacatcgcctgcgagatcagcggaataaaggcaagcacaaggataacgcataatgcagcatcagatgtatgatgaagataagggggcagtcatggtgagtatgaaagcagaacaaatggctgccatgatgacattgatgagcgctgccggtgatgcggaaaatgcaaccatgacggcgattgacgaagccaagaccggccatgctgagcgcagccgtaagctgttgaagcaggcagatgccaagttgaagcaagctcatcaagctcagacccagatgctgacgtatgaagcacgaggcgaaaaagttgacgtgacattattgatggtgcacagtcaggatcatctaatgagtgcgatgaccattcgccggcttgccgatgagattattgatctttatcagcaagtgcaggcgcgtaaataacggctggcacagcgcggttgacgtgcctgcaaccgcggcaataacgcgctcgcaatcaagagaggtaatccccatgaaaatcgaaaaaacattacagacaccagcagcttttttatatagcaagattattgcgcccgtacaagctgatattgcggcggctaacaatcaacaggttgcggcggcagaactcggtggttatgcttatcgcaagcaatttccagatggcgagtgggccaaagttaaggttactaagaatgtgattgatcgtgaatttgcgatgttgactatcacccgtttctcgcggttcaaggtccggtacctgatcacgccgttaaatgccaatgccagccaagtccgcgtcagtgaaaccgtgcagccggttaactgggcggcgcaattgaagcaaatggtgaccgaattattggtcggcaacaaacgccgccgtaattacggccggatgttagattcgattgagcggtcgtatatgacggcttaggcgttgttcgctgcatgctgaacactttatagtcaatatttgcaaatgaatttgaattgccctgtggcttttggcataattgactttgtctggtgcccttagctcagcaggatagagcgactgcctcctaagcagtaggtcatcggttcgattccgatagggcacagtacgaagcacagtcttgatggctgtgcttttttggaaatcacattgcacattctaaaaagtcttaaagattaaaaatgagtgcaatcgcatttttgcggtagctggatttgtctaaaaggagattacgcgatgcaagccttcacagccgtttatttgccgggctggttgattttcattggcggtatgttgatcattagcagtgtgaatgcagcgacggtgcaagccatggtgaatcgggccgggcgttcgaatacgcagctctggtatatgaaaccgggtatttttgtgcacgagctgttgcacgcggttgttgcgcggctcttcggattacaagtgactaacttttccatgcgagctgatgtggttagcggcagcgcagcacatgtcagtctgcggtacaatcggcgctcgccttgggcacaactgggattatttctgtccagcagtgcacctgtctggggcatcagtaccgtgttgctggtcatggggcgatgggccttttttccgacagatggccggctttggccagtcttaactgctgccacgagtctgaatgaaaaatggctcgcgatgcgcggcttgattcagatcaactgggtttggtttgtggcttttatcgtcactgccttggtgctgacgccaggcattgcgctttcagctcaggatctgcgcaacatgtggcggagtgccccgatcgtgttcttgctgacaatcgtgattttttatgtttttttgacgttttggccagctggatttgcttggtggtcgctgttgaacttgaatgtgttattgttagatgcgattatgctgcttttcagtatcttgatttggttactggcaagcattttgtgaatgaatgttgacaagtgagagggcaaatgtgcccgatgtcataatctataagtgaagccttttgttctttagtagggggaagacgatgattgcgccgcaagcggagacaattttaaaggaaaaatttggctatgatcattttcgtgctggtcaaaatcaggccatcagtcgcgttttggctggtgaaagcacgctggttgtgatgccaacaggcggcgggaaatcgttgtgttatcagattccagcgatgttgttgtcgggattgacgctcgtggtgtcgccgctcatcgcgttgatgaaggatcaggtggatgcgctgaacgataacgggattccggcggctttcattaatagtacccttgattatcaagagattgctgatcgccttgaccaagcaagaagtggtcggattaaattgttatatgttgccccagaacggtttgacacggattggtttgtgcaacggcttggcagcaccgatatttcgttatttgcaattgatgaagcccattgtatttctcaatggggtcacgattttcgtccgagttatttgaatctggcgaatgtggcggctcaattgccttcacagccaccggtcattgccttgaccgcaacggctacaccgcgagttgcgcaggatatttgccagcgactggcgattcctgctgacgggatgattaatactggttttgagcgaagtaatctgagcttcaaggtcgtacgcgatcaggatgaagatcggtatctactagattacctgaaactgaatgtcgatcaggcaggcatcatctatgccagcacccgtaaagaagttgaccgtttgtatacctttttggcacataagaagttgcctgtggccaaatatcacgcgggcatgagtgaagcgcagcgtgctgctaatcaggaagattttttgtttgatcgcaaaccaattatgattgcaacgaatgcgttcggcatgggtattgataaaagcaacgtgcggtttgtcattcacgcccagattcccaaagatgtcgaatcgtattatcaagaagccggtcgagctggtcgtgatggcttgccgagtgaggcaattttgctgtttaagccgcaagatctccaggttcagcggttcttcatcgatcaatccgaaggcgatgacgagcacaaacagcggcaatatgagaagctgaaaatgatggaacggtatgcgaacacagatcagtgtttacaacagtttattttgaactatttcggtcaaaacgggacaaaaccatgtggtcggtgttcgaattgtttggatgaccgggaatcagtggatgttacggttgatgcgcagaaggtcttatcttgtgtggttcgcttgcatgaacgttttggcaaaggcgttgtggcacaagtgctggcgggggcccacaatcagcgggtattgtcgtttcatttagatcaattgtcaacttatgggctgatgagcagtcgtcgtcaacgcgacattacaacgttcatagattttctgacagctggcggttatttagaaacccgcggtggtcagtacccaactctgggcttaacggccaaaggtgctgaggttcttcgcggacaagcgcaagtattccagaagacggcgcaaaaagccgagcagcatctcgaagtcgacgacactgtctttcaggaactgcgcagtactcggcgacaactggcggagcagcagcatttaccgccttatatgattttctctgataagacgttgaaggcaattggcagcgccatgccgcaaagtcttgatgagttgatggcagtcaaaggcgtcgggcaggcgaagttggataagtatggccaaatctttttggatgtcctgcaggcgattaaggccaaggcttgaatggctagtgtcgatcaaaaaaggtcgtgatcgcgtctttcccgttttgaagcggggggatgcggtcacggcctttttagctttttaccaggttttctccgccactttggtttatttggcggagaaaagacaatttacggcggagaaaaatacctaagcccagtcaccattgcggaaaatcggaacgacggtgccatcggccttgatgccgtcaatattcatgtcagctgagcccatcatgaaatcaacgtgcgtgttactttggttgaggccagccgcggtgcgttggtcggtggtcttggcaacgccgtctttgacggagaatggataagcttgtccgagcgccatgtgatcagaggcgttctcgtcatataacgtgttgaagaaaatcaagccggattgggaaatcggggatggatcagggaccagcgacacttcaccaagcgagcgggcgccggggatctttagcaggttttgtaataccgcatctccacgatcagcatgggcatcgacgacttgaccgtttttaaaggtaaaatgcatcccctcaaggatattcccgaagtaacttagcggtttagtggaggcaactgtaccatcaatgcggcggaaatccggcgccgtgaagacttcctcagtcggcatgttggccatgaattcctcaccgcgcggattataggcaccagcgcctttccaaatatggtgcttgggcagaccgacaaccaaatcagtacccggcgcgacataatgaagccgatcgaactgctcagcattcagccagtccgcttttgttcgcaattgttgatcatgggctttccaagcagcttccggatcaggctgatcaattcgggtggttttgaaaatggccgtccagagtttatcagtcgcttcttccgaggtctcggcatcaggaaaaactttttcggcccattttggacttgcagcgccgatgatggtccagctaatcttcattgagctgattgcgtccattaggcgggcgtaggcttgattgaaggcattttgatagttagcgatgcgttgtggatccagtcctgctaggttgtcaggatcggcagagatcacagtaatccgtttggcattgtgatcgacccagtaatcaaactgacccttaatgaaatcggggatgttgtacaggcgggatgttgccatgtgggccatgtccaaccgcttgatcagatcatcgtgccactgaacttgcacttcagcggcaccacggtcataagccgcagccacaatcaactgcgcaagtttggcctgatccacggcaatctgcaaataaaccgtgtcaccgggtttcacggcgacgccaatatcaaccgcgagctctgcatattgtttgaggcttttgtcaaagttaggtaatgtcatctttcgttccctccaaatccgtcgttggcaatagtctaccatagcagtcatcatcaggtgctcaacagttctaaaaaacgtccgggctttatgttcaaataaatgacaccacaaagcatggcgttctctttaaaaaatacttcgaaaaaaattaagaaaaccgtcaatttgtttgcaaatagtgtttctttctggtatgaggtctggtaaaataacagcataacatctagattgccttttggagtggaggcgtatccaaagatgtttgtaaatgagttgtgtgcaagctagttttaaataactaaagaaagcaaggggaacattatggcacgaaagaaaacaattacgcatgatcagattctcaatgcggcgtatgaccttgttgtggaacaaggcttcaagagtttcacagcgcggaatatcgccaaaaagatgaactgctcaacacagccaatttatttagaattcaaaaacatggctgagctgaaacaggctgtcatggatcgaattaaagaactactttcactgaaaatggcaaagcattttaccaacgatccagtcgttgatttggggcttgcttatatcaattttgcacttgaaaatcggccattgtatcgcgccgtttttgtggaagatcacttcggtgttgatgaaatgcgcgaatatgcgatgagcaccgcaatgcgcgtattcgattcttacgaaccagcacagcacttgaacgaagcgcagttgcgcaacacgatctgcggggtatggatcgttgcaacggggatcgccaatttaatggcaccaggcttcattgatattacacgagatcaaatggttgatattctaacggctgtgacgcaagacttcattgttaacggccgcttctcagacgacccgcgcatctcttggtttcaagacgccaagatcgctcagggatactaacgatcattaatagcaaattggggataaccgttccgatgtggagcggtttttttagagcgtgagctggcccgggtagaaaccggaacataagtggcctcaaggctaaatggctgggttttggccatttagccttgaggtccttatgtgtaggtttctgggccagcgaacgcgtttaaaggcgaatgctttttcaacgacaatgagtcccaccggttaacaaagacggcaacagtgcaaaccctgaccttgggccaaacactgctgccgccttttacatagtttccacttcaccgaatcactggaaaaccatctcacaatgcgctactttaaaactaacgatgttgtctaccgtctcacaagacaacacagaaaaccacaagggagcttattatgggaagttcatcagacctaaaagacctattacgcgaacgaatcgccgctaaatataccattgacgatttaaaagataccgggaaaaagattcgtaaaaccgcaccaattgaaagtctggctgccgtcagtaagattgatcgggaccccgtccagttcattaatagtgtcgaacaaaacttaaccaaatcactgttgcctatgcgtcatagtcgcatgggcgcttcgcaggcagctttttttcgcggcactgctgagttgatggcctatgacttgcagcaaggggagaagtctggcatcaatctgttaattgatggtgacgctcacttacagaatttcggtttctacgcatcgccagaacgcaacctgctttttgacctcaacgacttcgatgaagcgcagatcaacagctttgagtttgacatcaagcgtttgctgacaagtgtttatttgttaggcgaccaacaaggctttgatgcaaataaattagatgaattggtacagactgatgcatcgatttatcgtaaaaccttacgggatcttttcaaggttggtgcattggatcgtttttatcagtccaccgaagtcaaccatcttgtgcaggcgatccccggcgctgaagattcggcgttgctgtcgaaatttgtgaaaaaggcgacgaagcgtaataatgactcggtaatcaaaaaatacaccacaactatcgatggtaacatgcggtttaaagacgatccgccaagctccgtcaggttggataaaacgacttatcaggcgatctttgacggctttacccagtatcgtaagtccacgcggccggatattttggtgctactgagcgaatatcggattacggacatcattcatcacagcgtgggtatcggcagctttggcacgaattgctatctcgttttgctaagcggattaggtggcagccatcttgtgctgcaagtcaaagaagccttgccgccgcgacctgaattaattccaaatacggaacgcatcacgttacaacaagaagtcagtcagggacagcggatcatcgcatcccagatgattttgcagaaagcctctgatccattcctcggctggtttaacgtaggcgataaaagctattatgtccgccagttccgtgatatgaaggggtctgtggatcttgaggaactgactttccccgagtttcagtactacacccagatcaccacgtatctattggcaatggcacacgctcagacgcctcaggctgcagtggttaccggctatctcgataaaagttttgacagcgccgttcagcgttggagcaaatggtatctgaatcaggtaaaagcggattattcagcctttatgcgggcagttcagacgcacatgctggcctgagccatcttggaactgattgacagatcagatttttcttgtcctgatgacgccactctggcaaaataaagttaagacgctaatcacctaacttaatgacatgcctgaagagcagggcgtcacagaaaggaggcaagtgattatggctcgcaaacaacatcaaaaaaagccgccgctgctttccgccgaacaagaagtcgcgattcaatccgggcgtgcagcattggcagatttggcgttgccacgccgcaccaaaatgcgggtgtttgttaaacttgccatcaatcggatcaccgaatcgaacatcggccaaagtgctgctgccttggcgtactataccttgctgtccttattcccattgattttgtttgtcgccaatgcattgccttattttggcttaacatacaaaggccttgctgcctatttgacacaggcaatcccatccaatgtcatgaattggttggacccagtgatcgccaatctgttggattccagcagtggcggtttgctgggaattggggcggttgcgactttgtgggcggccagtttaggcgtgaatggtttgaaaatgggcttcaatcaaatttacggcgtcgagtcatcgcaaaattttattattcaacgcttattatcgatgctcatgaccttcacactcatcattgtgatgggcgccattctgattgttttcgcatttggccgccagtttctggaatggctgatcccactgcttcgtctcaacgatgactggctgcgaacatttaataccctacgttggccagtgacgattacggcgctttttgtcattattatgtttttaaattattttctgccgaacgtcaaaatccggatgtggacagtcttaccaggcaccgcctttacggtcgccggttggctgttaattgcccaggcgttttccttatacatgaaatattttgggacacgctatctgtcctatggcacgataggcaccttcatcgcgatcatgttatggcttaacttctccgcactggtgctgttgtggggcgccgtcatcaatgcactcaccgctgagtatttcattggccgactgcatggcagtaaaggcaaagtgcatgatttcgtcaaacgccgcgtgcggacaccacacgaagaaaaagaagcgaaaagctagtcattgagtgagcaaccatggctgagagcagcaaaaaaggacttgcgttcatctgagagcgcaagtccttttgctttaaacggttttattgcaatgcctgatacttttcaacaagttgtttggtaaaggcctctaggtgcttaatatcgtcttcttcaggggcgagatcgatcttaacgtcttctgcacccttcgtggctccggtcttggcaaaagccttgtcaaagtcgtctactgaagtggcaaagtcatcatagaagcgatcaccgctgccgcagcaaccgtagaccttacctttaagatcgagttcttgcaactcttcatagaagtcaacggcttcatcaggcaactcgccatcaccgacatctgaataggtgtaagtcgcggtgacacaaatatcgacatcttcaaaatcgctggccagcgcttgagaaacttccgttgtcgtcacgtccacccctaagtcctcaaaagcttcttcaataataccagcgatatcctcgttgttgccggtcaaactggcatatacaatccttgcgcttgccatttttctcttattcctcctaaaacacagcgctcgggggcttacacgtcggcgaggctgccttttcttgttcatttgcctgattatagcataggggacacgactctggggatgtgaatcgaaaaggccaaagatccctgatgtcatagccgacaccgacactgtttaaccaaccattctcagacttctgttgtttatccctgattaatgctacactaattgcgagctaaacttgtattggaggcagaaaagcttgatcacgatcaaatcagcacgagaaattaaaggcatggcaaagtccggtgccattttggcaggtatgcaccttggcctgcgcgatattatcaaaccaggcatctcaagctgggaaattgaaaagttcgccaaagaattctttgaatctcatggcgccaaggccgaacaagtcggttttgaaggttataagtatgtgacttgtgtcagcatcaacgatgaagttgcgcatgcggttccgcgtaagggcctgaaactcaaagatggcgatgttgtcagtgttgacacggttgtcagctggaatggctacttcagcgattcttgctggacgtacggcgttggcaaggtgtcagaagctgaccagaagctgatggacgttaccaaaaagtccctgtacttagggattgatgaagcagttgttggcaatcggatcggtgacattggcgctgctattcagacttacaccgaagatgataacggctacggcgatgtccgtgagcttattggccacggcattcagccaaccatgcacgaaagtcctaatgtgccgcattatggcgtgccaggtcatggtttacgactaaaagccggcatgaccattacgatcgagccgatgatcactgaaggtacttggaagatcaagggtaaacaagtcccaggcgatacttgggaatactacgtcactgctgacggcagcaagtgtgcccagtacgagcacacgctggtcatcacagataacggcccgaagattttgacttctcaaggcgatgccattgacgagaagtacaagttaaccgaggccgatcttaaaacacttcctgaataagagcggccaacgcgatcattcagaaacaatagggcacgaaaaaacggggtggcgatgacgattgctcaccccgttttgtatgtgagcgcgaatcagcccggttagaaaccggagtgtaagtggccttgatcgtgatggtcgggctttgaccattgcgatcaaggtccttacacgcaggtttctgggctgattcgcgcgttatcgcaacttacaaacgaatggtacttaatcaaaccagttcacgttatactaaaggaaaggacgaaaagagggagtatatggcagatcctgaagcgctgatctcggttatcatgccagtctacaatgcagagaagtatctcgcagaggccttggacagtttattggcacaggattatccgaattatgagattatttgtgtagacgatgggtccatggataccagtaaagttatcttggcggcttatatgcgagaaaatccccgaattcacgttgtgcgggttcaaaatggcggtcaagcacgggctcggcaaattgggattgatcatgccagcggggacttgatcacgtttatggatagcgatgatcttgttcatccgcagtggctatccaccatggcagacgggatgaaggcaccacgggtcgatatggtggtcgtcaattattacaactacattggcagtacgaagatgaaggcacgcgcgtttcgtgaatcgacatttaaaatcgaaggcgatgacaagtatcgctattggctagaggatcgggatttgcgcggttatttgtggaataaattattccgtgccgagttattcgaacagccggtgcctgtcgcgaatttcaatttgttagaggatgcttactttatcggccatcttttgccgcgaattgatcaaatcggcttcattgacgaacctcggtattattaccggttcaatgcgaccagcagtgtgcatgccaagtttcaaaaacgcgacctagaggcgatccatcaactaggcgctgttttcttgacccttgcccgcgaaaaaccggaattgacctcgctggcagtgcgccgttatgcggccctgagtctatttgtgttatcaaaaatgtcaccacgtcagcttgttaaaaattggggttatgtccgtcagctggggatggtactggggcaatatacccgcgagtttcaagatgtcatctcggcaggcgatgtcaacgatttagcgacagaaaatccagacaagcccaacaaaacgagcctgacaggcagattgcgcgcatggtcgcagctgttgggcttgccgaccttcgatgacttgaataagcttgctaaggcggatgatgatccagaagatgtgaaaagagaatcttagtgagggacaaacgcactcacagccgcagcaatatttcgcatgagtgacctcagcgttcaatgactaagacacagtcgctaagcgctgaggcaacttacgcttttgtttctaagcgactcgcacaaaaaaagccgccactcacgtgttttgcgagtggcggcttcctagcgatcatcgaaaaagtgctgatgggggtttcagcaggtggcggttattcagttatgcctgtggttctgcaggttgtggttccttcttctcatcaacatggtagatttcagtaacctgtgtctcggtcatcttggcgcctgtcggggtcgcgtacaggttgacgccatccttgacgaaggccttagcatcagcgacaacctgcgcgaattgtttggcctggtccgccgttacgtcagcttcgtacttgtttaaacgaatactggtggtcttaccaagtgaagatttgaaactgaaagaaagtgttttcataagttagccctccgtttaggcgttcagttcggtttgctgttgcaagaccgtgctgtgcagttgagtacccgggtacaaactagcgaaggcactgccgatcgcgagtaattgaccatcgtcagcttcaagcgcgacgttgttcatgcgccggacttgtttgtaatcctccttctctgggtcgatcatcgtatagacaatggcttgtgctttgattgttcgtggcatgttgcttcctccttgttttcagcgcttgcgtgcgcttttcatcgtcaattgcaactgtgtgactagacttggccaaagtcaggtcacgcggtatttaaaatacaactaggtggatcaaaaggtgccatggcatcgtaagacatttttttgccttacacttatacaaatcggtgaacccttcgatttgacaaccctaaatgatcgaaaattcggaaaccattgcacaaagttgaatctctgctaaaataattaaggtgattctttagaaatagtaaggtttttgttggtttacgtcactgtgacgtaaggtcagctatacttacagtcggattccctctggggtcctatataaatgaaaaattgaagggttctgattgtgtgataacagcgcaggcgccaggcaagctttatgttgccggtgaatacgcggtggttgaaactggcttccccgcaatcattgtggcgttagatcaattcgtcaccgtcacggttgaggcaacgaagcatttcggcagtatcgtgtccgagcagtatcaggaaaactcgctgtattggcagcgtcaaggcgacgagatggtctttgataatcgggataatccgtttcattacattctctcagcaatcaaattgactgaacaatacgctcgagagttagacaaaccgctcgcgttatataagctctatattgattcgcagctggacgccaaggatgggaagaagtatggcctaggcagttcagcagcggtgactgttgccacgattaaggcattagccaagttttacgacttgaaaatgtcgaaggatcagatctacaagctggctgccattgcccatctagacgtacagggcaatggctctttaggtgacattgcagcatctgtctatgggggatggattgcctaccgttcgtttgataaagcgtggttggcggcagcacgaaaccagatgtcactagccgacctgattaacactgattggccagagttgtcgattgaattgctgacagctccggctgacatgcagttgctggttggctggacaggttcaccagcttcaacttctcagttggtcgacaaaattacgctggccaaagcgaagaagccacaactttaccgtgacttcttgactgctagccgtgaaaccttagaaaaattaattgatgggttccgcaaccgttcgttgagcagtattcaagctggtattcgccgcaaccgtgagttgttggatgaattagctcatttctcgggggttgcgatccaaacaccagcattacgtcaacttgttgaactagctgaacaagcaggcggcgcggcaaaatcttcaggtgccggtggcggtgattgcgggatcgtcttgattgattctcatcaagccatcaaaccgctacttgcggcttggcgcgaccatcatatcgagcctctgaaatttaatgtgcatgaaattaatgattaaagacaactcgattgctaatggtgatcgagttttttattttcagcgatgaaaatgtgaattctttgttagaattcaggatttccaatacttttcgcaagcggtttctagtatagtgtagtaggtagtcaaattagtaagagaagggacttgtgtacacgtgaaagttcgtaaagcagtcattccggcagccgggcttgggacccgctttctgccagcaactaaagctttagccaaagagatgttaccaatcgttgataaaccaaccattcagttcatcgttgaagaggctaaggccagcgggattgaagacattctgatcgttgagggtaaacaaaaacgttctattgaggaccatttcgattctgctcctgaattggaacagaatttgaaagaaaaacataaagatgccttgttggagttggttcactccaccactgacatcggcgttaatctcttcttcgttcgccagccatatccgcgcggtcttggggatgccgttcgtttggcgaagtcatttgttggcgacgaaccatttgttgtcatgctcggcgatgacctgatgcatgacaaggtaccattgaccaagcagctgattaacgaatacgataagacccacgcatccatccttgccgttaaaaaagtgccacatgacgaagtttcagcttatggcgttattgaccctgaaagagaagtttcaaagggactcttcaacgtcaagaaatttgttgaaaagccagcggttgccgatgcaccaagtgacttggccatcattggtcgttacttgttgacaccagagatctttgatattctcgaaaatcaaaaacctggtaagggtaacgaaattcaactcaccgatgccatcgacaccttgaaccaaacccagcgtgtcttcgcccatgaattcaccggcgatcgttatgacgttgggaataagtttggctatgtgaagaccaacatcgaatacggcttgacccacccagaagtgaaggatgagctgcgtgcttatattcttgacttggcgtcaaaactgcaggcaaataagcctgtggggaagccggcaaataagaagtaaattcataacataaaagttcaactgtcaataacagagctgtttgacgatacacagatgagtgttcgatcagacagctctgtttgtttgcgcttaggacacaggaataatgctataaaatggtttcaagtatttagtaaagcaatgacaattaaatcgatattataaacagttcaatattggaaaccgttttctatagcgttaaaataacatataggaggcgaggatcatgaaaaagttctggaagactttgttatcagcactgattatcgcaataagttttggtgcatttagtacagccaatcaagtggatgcaagggttaagttcacaagaaacgccgatttttacaagaatgagccagaaaatgctaaaccaagtgtgctatcgactattacgacaatcaataaaaatggcaccatgatttatgatgcagatgctgtgaagcaaaaagatgtgatcgcggctgctgctgcgcattggaataaggcagtcgggattaacttgattatgagttatcaagaggcgcatgttgctaaagccgatgcggatgtcgtcattgaacctgcagatttaccggcgggtattggtggggtaacaggctacgacggctatgtatatgaaacttggcagaatatcatcaaaatcgctaacaccacgttagatgctgctagttcacaaaaaggttttgttcaagctgtttcaacgaccagtcacgaaatgggacatgcattaggtctcaatcatgatccgggcgcactgatgggaacgagtggtgcggctgaactggcaaatggcattttaccggccattcctgactataatgtgaatgccgttggcgcgatcttgaaagacttggatcagttatacccaggatcgaagccgatcacgattccgaacatgaccgatggcagtgcttatcgcgatgctggcacaactgaggaaatattgcccactgaccgagttgcacaactagtactaggtgttgatcacttggcgacacgtaactttaatggtggcaccgtagaaattctcagcaacgaaaatgtctatcaagtcgggcgaggccaagttggcaccacgaactcattcaatttgactaaaacgaagcagccaattgtaactggctacatgagtgctggttcccaaaggtattatcagatcaaagttggcagtcaatattacattattggcggcggtagtcgcgtcatcattactggagatgcgtatcgcgataacggcaccacgacggatgtcctagataccgacttaatcagtaaactattcaaggatgattctcgtttagtatcacgggatcttactcataaaacaattgaaattacaggtaatgaagatgtttaccaagtgggtgttggacgtatcagtacaacgaacgcacttttgttgacaggcactcaacaagaagtcttaaccacttatgtgaaggtaaatggctttcatgtttatcaaatacatgtaggtgacagatacttgattatttcaagtgattttaccaaagtagtaaattaagccgggctgttgctttttattgacgaggtattattagatcaaagtggataatcagtactacattattgaggcgatagtcgcgtcattattactggtgatgtgtatcgcgataatgtcaacactccggacgtcctaagtacagatttgattggtccaaagcagcaagctctgacaactatcacaaatgctggtgagggacatgcttatcaaattcatgttggtgacagatactttatcatttggagtgactttactaaggttgctagttaacaaaaaatctgcctactatccttaaattaaaaagaggagtctcgttctttgtcagtcagcgagagtcctctttttgatggtgagaattgtaaaggaaaacacaatcttatgaatcactacgttttaaaactgatactgtatagattattaaatctgtatctagttcttgttcagttcacttctcaagatttcaactgtgtgttgcaaggatcgagctcggtcaaaaggcgctgtccaccccagatcgttaatcttttttgtgtcaagaagggctttggtcactttagaatatccggcagcttcaatatcatctggcaggtcatagactactttcttcccaaacattgttgcgagttcattagcaaaatcttttagatgtagatttaaatttgaattggcaatattataagcttcccctttttgaccattcacgagtagaaaaagcaacgctgaaacaacatcaccaacatatgaataggaatagtattgggtaccttgacttttgaggacaatattttctttatgaactgccttcaagatgaactgcgacgacgccttagaatcattgagtttcatactaggtccaaagacacgactaagtcttggaatgacgatgttgaggttgtaagattcaatatacgcttgacatagtgcttcactaacacgttttccttcaggatatccggcccttagtgtatttggattgatataccccgaatagttctcatcaaattgatcaacgtcaccgcgattttcgccgtatatctccacacttgagagaaacaagattcgctgtggccgatgacgaacagcgtgtttaagaatctgttcggtacccatcagattcgtcataatagttccaattggatcagaagcatatgcacgaggatgtgtgttgcttgcggcgttaataacgtaatctgtttgcagagcagttgttaacggtttggtaacatcacctacaaccagatggaaatacgatgaattttcgtattgggaaaaccgctgtatcaagtgcgtctcgttgcgtcccattgcaaatacgtggatgtgcgcatttgcagttacatttcttctcatcagaacatcaactaaaaaagtcccgatcattccagatgctccaaccaccaagaacgacttttgatcgagatctgaccaacttttctgatttaaaatcacgtggtctatgtcacttaggtataaatcattatgaattaacattttgcggcttacagctccttctcgcgtagatatgctttgaataaagctaaatcgtcagtggttgtcagcttaatatttttgtctgacccggctgcgaaatatagcgtatgacccagatcaaccatcatggtatttgtataggcagaatcaaccataccgatgttttggctaatagcctcgttgtatgcatcgtgcagaatctcatacttataagcttggggcgtgctgacgcgccgtaaagtgttgcgatcaatatatttattagttgttttctcagtttccttaatgaaaatttgttcattgtatggcaatgaagtgactgcattgccatattcttgacattttacaatgacatcggaaagaacatattcatccacgagtggacgaatgccatcatgaatcactacaatatcatccccaacacacttatcactaaggaactgaacggcattgttaatagatttttgaacaattgagccgcctgaaattacccacttaacttttttaataccgaattcacgtatatatccccacatggtgtctgcccagccttgtttacaaacaacaacgacttggtcaatcttgggatgtcggtcaaatgattctaatgtataaataatgatcggtttttcgttgaccatgacgaattgttttgggatttccatccccattcgtttaccgacaccacctgcaagaacgattgctgttatcatatagctttctccttttggaagatacgtaataaaggcaaatcaaacctgtcatatgagactgcttgacttgccttcattagcaaaaatattgaatattaattagtatatttttcaaaaagtatgttcgaatagctttaatcaactaccatttattatatggttcattaactgccagaagcgcatctagggctgcgtgcttagcaaacacaccatttcgaatcaacttactaactcgggcaaggttaggctgcattgcgttgtattggtcttcagtaaaattctcaatgattggccaaatgtcagcaagattctccacggcaaatccaacgtggttttctgtgacccagtttgccgcagctgcatgtttccagatgaagacgggcatgcgttttgctagatatagactcagtttatgctcgtaacagagacggttgtattctgcagattcaccaatgacctcatcaaagctgtctgagtcccatacgagaccaaaaccgccgtcaaaatgattaggcaattcagtaggggtgaatgagcctttgtaattgatattttctcgatcaagaagttcttgatgcggctgtccgccgaaaacatcgagatgccaatgctcaggaacttggcttaaatattttgagttattgatatttccggcgaagactatcttcttatgaaattttggcgggacagggtcatcatcctcaataaaacgataactgaacgggccttgcggaataatagggcgggtctgtactagaatttcggacagaaacataagagaattgatttatccgaaaggagtcctcaaaatgacctattcacgcaatcgctacgaccaagattttaagaaaaatgcggtacgtttgagttttaactcttccaaaccagttaaaatcattgcctccgaacttggtgttcctgaaagtgccctgtatcgttggcggaagctatataccgaagatggaaagcaaacgccgcttgcttctttagaagctgagaaccgtgccttaaaacgtgaaaatgccgaattagcattggagcgtgatatgttaaaaaaagccgctgcctactttgccagtctccagaagtaacccccagcgataagtatgcttttatgttgagggaaacctctgtttctgtggtaaggtgggcgcgtttgttagacgtatcaacgagtggttattatgcttggcggagagctttgccaaagcgaaacgccaaagaaaggcaatatcgtcaacgaatcaaacacttttttgatcaaggacagggcacttacgggcccaaacgcatctgcggtttattgcgtaaaaatggtaataaagcttcctatcaccgagttgcccgtctgatggctgatggcggtctgtattcaacgctacgttgtcgtcatccgaagagtttgaccgatagccgccttgctcgtcaaggtgattatcccaatctagtgaaacaccaatcttttaagccgtttgaagccttatcaagtgacattacacagacgacaacatcagaaggaaaagcttacatttgccaaataagggatttgaacagcaacctagtgttagctcatcaaatatccaatcatatggacacggatttagtcttagcgacacttaaacaagcccaccaaaggtgggctttgccagaaacgtgtatttttcatagtgaccgtggtagccaatacacggccaaagcagtgacaaagttggtcaaccaatatcattggcaacgtagcttctcagcattgggaaaaccgggtgataacgcttggagcgaaagcttctttgccatcatgaagaaagagctcatttatcagatacaatttaaagatatcaatgatctgagagcgcaagtcttcgcttacatcgagaccttttacaaccgcgtaagggtacaagcacgcttagactatcttgcaccagtagcatggctttccttgtatgaccaagcttcacaaaaagtcgcttagcaaactgtccgaaaaagtgttgacttcccggcccttaaaatcgagctcctttttcatagcctctttataattctcaccatggacgattagtgcatcaaacgtagagaataatgcagggtatgttcggtaagaatattcatcaagccaaggatccgaatcggtgtcggccttagctttttctacattccagagtggataataatcgtgaacaagtccgataactttaccaccataagctccctgaatctgttcgatgaggcgcttgaggctgatcgagttgttgtggcaacagaattacaacgtcaagatttgttgattgattttccaagtggtcagaagaagttcgccacaattccggtcggaggcgttgctgacaaggcaaacaacattacgccacgatcattgaagcagccaattcgactcattacagcctcgcgactagcagccgaaaagcatatcgatctcatcgttcgcgcagttgctcagttgaagcaacagggcgaagacattcagtttgacatctatggtcaaggcggtgaacaggggaagattctaaaggcgattgatgaacctagattgcaataataaagttaccacctagaaagaggcttgctcactgcttgaactggggtttgccaacggagacattttctaggtttgttattgataagcgctgtggcttgttgaatatcggtctctgaaacctgatcaaactgtgttcccttcgggaaatagtagcgaagttctcgattgaaccgttcatttgtgccccgttcattcgggtgataggcgtggcaaaagtaaaccggtatccgatagcgctttgtaagcgcctgatcgcaggaaaactctttaccgtgatcaaccgtcactgatcgaaccggacccggaaagtccaccatcagtcttgcaaatcccttgagaacagcattttgtgataagttttcaagcttagttgtcgccattaaacgtgtcacccgatcgacaatggtcaaaacagcagcctttgacccgcgaccaccgcgaactgtatccatctctaaatgtcctttttcggttcgccgattagctgactcactgcgaatctcaattgaggtgcctactgcttggttatagcgcgaccgaaggtcttgtcttcttttatgacgtttaccgtgatcaaagagttggcttggctgaaaatcgacttgtctttgataaatccagtggtaaatcgtgtgtggcgcacagtgaacggcataaccgaccatttcaggggaccaacctaggtttagcttctcagttaccatccgcttcaacttaggcgttaaaatcgagtgccgaccacaacgatgccgacaagtatcggcatgatcctgagctataatggcgcagtaatcaccttcagggcaacggtgaagctcatgcctaatagaaatacgagagcggcctaaggtcgcggcgatgtattgaatcgtgtggtgttgcatcagttctatctgagatcgttcaattaaggttataatggccatgggacctgtccttctctctagatggtatgttatgcaaacaccattttagcaagaacggacaggtcttttttcacattttctgggtggtaactttaattatgcaatctaggtgaaacagacgctaaagactatgtttcattaaagggtctctcggatgatttagctgatgtttatcctaactatgatgcctttatttctgcgtcattttctgaagggtttggtttaacatatattgaagcgctgaatgcaggcttaccgattatcactttcaaggctcgatttggtgcaatcgagttggttcaagacggagaaaacggcttcttgcagccattcaagcgtgacgacgataactataatattaatcagctcgttgaagggattaagcgattaattagctctgactatgctcagcttcaagcgaatacgcagacttctgttaaatcgtttcagaatcatgtcattgctggaaaatggaggaatttaatcgatgaattatgaactgttgaacacaattgatttgaatgccgccatctggacggacatcaagaaacgaatcattgagaataatgccactgtattaactttggcagcttcaccaatttatggcgatgtccttgctaaagaagggttgcaaggtgttaatattgttgatttagtgacaaagcgaacataccatccgggaaagtatcgtttctttaaccgtgtgcgagttcctacttcagcaaaagtagatatgaatgaggacggcagcatttccattgttcatgaaggagaagatattggcagagagtttctctttccggatacgcggcgtgcggcacaggatattcggtataataatcctgatggttcaatggattatattgaggaatacgcagccgatggcagtctctttagcaacattttctacttcaataatgagattcaagaattggtcttttatgatcctcaggagcggccaatcttgcgatattactattataataatgccatcaattttattactattgaggacccggttagtcataaggtacatactaaatatgacacacttactgagttcattcaggaccagatggcgaaattcttgcgtccaaagatacggtgacatttaactaccttggaatcgaactcgaatccttgttaaagactcaatcgcataacgtattgcagttagttgaagagccactcgatgacaatcatgaacttcgtggcaatttacgggcaattttagtgaatgatgtcccttatgttcaagaagtacgcatgtcgcttgctgcctttcaggagttggggtcaacagatgcaccaatgcgaaaagtcagaatcggttgataaagagacactcatctgaggttgattagtaagatttaaacatcgctcagttttcataaaaataggcatacgcattctggcgaatttaaagtgtcagagggtgtatgcctatttatgtgcttgaagtttaacttcagaatttttgacttgtctcaatgaactgtaacgcggcggcaatgacctgatccatgttgtaataacgataaagcccgagtcgtccgccaaaagtgacgtttggcgtgtttgcatcagcatattcacgatattgcttgaacaagtgattattggccgagtcattgattggataataaggttcaacaccacgtttccattgttgtggatattcatgcgtgatgacagtttgctgtttatttccatttccaaactcgaaccacttgtgttcaataatccgcgtataaggtgtttctgcatcagtgtaattgataacagcgtttccttgataatttggttcttccagcagttttgtttcaaagcgtaatgatcgataccccagttcgccaaagcggtaattgaagaattgatcaatcatgccgctgaagataatgtggtcatagtttctgagatagtcatccttggcactaaaaaagtcagtattaacttgagttgtaatgtgtgggtcatccagcagcttttcaacaatctgtgtatagccgccaattggaataccttgatatggatcgttgaaataattgttgtcaaaagtaaaccgtacgggaaggcgacggataatgaaagccggcagatctttcggtgcccggccccattgcttggtggtgtaatccttaaccagcttgttgtaaatgtcagtcccaacgagggaaatggcctgttcctctaaattggtaggcttcttgccattcaaaacagcgcgctgttgttcaatcttggcttccgcttcattaggcgtcgtgacgccccacatcctgtagaaagtattcatattgaatggcaagttataaagttcaccatgataatttgcaacaacttcattggtgtaccgattaaaatccgcaaattggttcacatattgccagatttttggattcactgtatggaagatatgcgcgccatattcgtgtacttgaataccggccacatcttttgtgtatatattcccagcgatatgatttcgcttttcaatcactgtgatatcatggccctttttggcgagttcatgtgcagaaactgctccaaatagaccggacccaacaactagaattttcatccgtttattaaccaccctttgttatgatagctttattgtatcacaccaattttgtctcaaaagacattgataaaatgtaattctgagtctttaattcaatttctttcttgaaggaaatgtgcgttgaatgcgtaataagtatttaagaacatacggtttgatgttatggtattagttattaagtgcgattctcgttcattgatttttagcttaattgacacgtgaaataacgcttatgctagcagccggttaagggggcgttatcttttggataaagagtatgtcctaggggcagctgttgaagacgattaaacattgcggtcatatttgttacatcatttttaagcagaatatggctgagcgtgatgggaatcttttggacacacttgttataagtgaatattaattgtagaggagacagaaaatgatggataaacaaaaacagaacacttgggaagggtactttgcacaaagatggtttgaatttgggaagaaaggcgaggaaccatatactcgccgcatgattctgacctcagacggtcaagtggacaactacacgtctgtcaacgaacgatactggcaagttacagacgacgaactccaatttctaaatggtgatcatcaagtgacgactcggtttccattacctgcagaccctttggcaatagacaagttcactttgattggggattttgtcttagatccttcaattcatcatcaattagtcgctcgacatatgcctgagagtttgcacgaacttaatgatggcatgagacaagacctagatgatcactttttacaagccgcgagctctacttatcctttagacagaaagattaagactcattcacatattagagtggccttcatcataaactgtgttgaaaccttaccagcgttgttgcctttgattaaagccgtcaaagatgacaatatgtttgaattaaaggtgattgcggttgaccggttttatgaatctgtcaatgtgttgccaacacttgctaacgttacgaaatttttggacaaacaaggtgtgccatgtattcctgtagatggtaactatgaggtagcgcttcgtaaactcaaattatggcaagcagattttcttattcgtcagtcagaatgggatgaagattttccagaggcattccatgctgatcatcttgattgggcaagattgattcatattccttacacgattacagaaaaaatgatccatccggctaaccaaaaagagggtagtctactgactaatgattattacttacatgtttggcgttattttgctgctgatccgctttctcctaatgagaagcaggcagttgatacttccttcgtctcacaagacatttttcagccagttggatcgatgaaagcaaaaatgattgaacacgcaacccctcattggccgattcatcacggcggtaagcgtgtactttggacagcacatcacaccatcactaagaattggtttaattttgggacctttcctgagatttaccgggctatgtatacttggacgaaaacacatcaagagctatcggtattgtttaatccccatccattacttcgagaaattattagcacggaggaggtgcctggtctcacgttgcagcaatatgatgattttctcaaacaatttgatgaattaccaaacgggggtgttttgcaaaacacctcgcaatacggtgcatcagctgcttcagacattattttgacagatggcgcctcagctttctatgagatgcaaattcagcgtaaaccaatcgttgcacttttacgcaaagatcataccgcgtttacagcggaaggtaagcagattcttgaaggcgttcatgtacagacggatatttcggctgctcagcgagacatcttgcggttgcttcatgagccagacagcaagcttgataaacaaattgctaatacaaaggcatggttggccaacgatcatccagaatatgcaattatgcaagcaatgcgcggtgaaatgggctagtagtacatgcatgtaatactatgaacaaagtgatccttggacaatatcatcatccagtgattaaaagaacgaaaaacatggtttttcgttctttttttctttacgtcaatagctttaaatggcgataaaaagggcttttttagaaaatgatattatagaactcgaatgattaaataatgtttaccatgtaaaaatcacagcagttatattataattaatgatgtgtagatcttaacaataagattgagatctcaggaggagtcaatggacaatgagcaaaaacaatagcgctaagcaatttattaacgaaaacggtaaggttcgttttcgattatataaatctggcaagaagtggttgattgccgggacagcgacagttagcggcctattgggtggaatgtttattatgccacacggtgttcaagcagctagtcaaccgcaaattggaaaagtgattgataagggtgaggtattagcgactaaaggttctgccacaattccggcaagctcgacacaggcttcaaccgcaacttctgaatcggcttcaaccacggatctaaatagtgcttcacaaagcacctcgacaagtacgtctaccgctacttccacttcgacgagccaacttaactcgaccagtcaatcgagttcgactagtcagtcaacatcaaccagcggtgagaatagtagttcaacgagtaccaataagtcccagtcggttcaggtggctgatcaaacagaagctaataatcaaacgactactgttggcaaggctttggctgctgtaacaaacaatcatagtcttaagaatgcggctgctgttacagcaaatcctgatagttggcaatataaatcaggcctgagtgatgctaagaaccgaatggatgctgattaccatttcttctataacgggattggcgctgacctgcaaattaatgtcctcaatcttcaggggccaggcagagctgtcaaggaacttggacagctttatgactattacttagcaacgaatggcacaatgcttgatgccaatggttattctcaagcatatagcttctttggcttaagcacgtcaaatacagactatgcagcaggatttgcggcttattctgctgcctatatgaagggcatcgttggctggcttgatagtgttaaagctaaggctaacgacgaagcaaatgtcaatagtatcattgactacaagccgtatgatgcgagcgctttgtcaggcggcaactttggcaacaatgtcagtgctttcttcagatttgtttcaaactggatttttggggcaggaacgtttgcgcctaatgtattgaacgcatacacgcccgacgcttcaaatattgcagcttcggaaataaagtcaacaatcaataatgccaataacattattggcttcatcgcgacccaagtgattaacggaattgcgcatatggcactatctgatgttcgctcccttggcggtgctgatgtcgctatgaacacgaatccagcaactcagaacccaatttctgattatgtgcctaatacattgcaacaggctgttgcgctcaatggcggcaacttcaacatgattaagctgtttggtctaagcaatgtgatcacttctaaatttgttaacctgatttatgaaggtattgcagaagtcgcacgtcatgcgattcaatacaatttctttaatggcgtgaaacgagcgcttcaaaatacgctgaatgggacaacggacgatggcagcgcattttattcaggcaagggggttgttggctacagtgtcaccaatccgggacaaatggccgatgatgaccaaacgatcaatttatcaatggtgtcagaggcaaatggctatgcgtgggcttataaagtccttgtgcctctgattaagatggcctcagacaatgcactgaaagatgcagaaaatggcaataccaatcaggctaacctaccagcattttatttagtaaatcagctcattaccgcaaatgcattagccggggatcaaggagctcagattgttaacaatgcaccacatgcttttcctcaggctaaaggtgaggcggcgaatgatcgaccaccggcacctgcggcaacaccggtgagtccactggggcaagggtggtggtttttggttttcaccaatggtctgatgacgcaaccgagtgatcagaatatagttgccaccaatggatcatcgatgacagttgcggtaccactcgtgacgacaaacgcaaatggcatcttcggaattggaaatcagcgtctttcatccgttggttatcaacagtacaataattccaacgggtggccgaatcgttttacagatgtaggtagtggcaatctgagtgttggatcaaatcaaccgtcaacaaatgcaactgcaaagttatcagtgccaacaacatctgggacttactattatcagctgaagcttacctataataacggtagtcccaaaacagtgtatagtgatgttttcgcgattactgttgtgcctaaaccgattgatgcgacaggcttagtggttaccgcaaatcaaaaaagtgttttgtggggccagcaaattggtttaaacgcgcagccaatgccaacgaatagcacggcaactataggctggcgttgatcctaagtttggtgttttttcgagtacaagcggccagaaaaccagttttacgacaaaggcaccagctaatgaaagagatgcagtcctgcaaaatgattctggcacaccgattaacttgacagcgacagcaacaaattccgatcactctacagttgagggaacagcatctgcaacccttggcggcgtttatccaataacagtgcaacggggagaaaactttaatgtcaaaccagatgcattgaacggtgttcaatatccttcaaacccggattttagatggtttatttataaggatcagacagggacgactgaatacacgccatcgacaagtgagcatttagttcaaaatacagataccttacaatggcagaatgttcaggcaccacagggaaaattgtattaccagctggttgttaccttcaataaagggacaagtagtgcattttcttggtacacaaacattgcgccactaaccatcacagctacaaatcccgaactgcacgcagttcccaacttgcaatttgctttaagttcaggcacaaacccaactattgccgatttttacaaggcaagtggggtgatgatgcaatatgcgccaagcaagatggtgaattccgtaaattgggatggcaataatgccggtgtgctggcgattactagtggtggtagtcaatggcgtttgaacgttcaattttcgccgtttaaaaatatgacaacgcaacgcaatcttggtggatcgtctggtgggactgctgcgttttccttgcattttgcggatggaaccacgatggcagcaaaggatgatagtcagccggtgacgctttacaatggcgcaactcagaatgtgacgacaacaacgtcaaccgacacttctttgaagattcctcaaaccgcatcgattcaacccggtacttaccaatcaactgctacttggacacttgtcaaagcaccttgataaaagccgtttgccattgagtgacacaatggtttgaaacaaaacggttgtctttaaagacacttttgatgatgggatatcaataaaaacagccgcttatcttctggcatcaagtcagagaatgagcggctgtttgcattttgttgttcgtcccggaaaatcgagaataagcaaggttgcattaaaaacagttgctattacaaaccgttttgctgaataacctgctgataccaataaaacgactgctttcgatagcgcgccaaagtaccactaccatcatcatgtttatcaacgaagatatacccatatcgtttcgccatttcacctgtgctggcagagacgagatcaatgggtgcccacgaggtatagccgataagatcaacgccatcttgaatcgcgtctgccatggcggctacgtgggcttgcaagtagttgatacgttcggtgtcttcgacggttttactgccgtctttttcgatcaggtcgtcacgcgtcccgaagccgttttcgacgaccattaatggtacatggtagcgatcataaatttgattgagtgctgtgcgcaggccacgtggatcgatttcccagccccagtcgctacgatcaagataggggtttttgacgccgctgaagaagttgccgcctgcttgctcgccttcacccgtggtggtcatggtgctggattggtagtaggagaaggtgtagaaatcaacggtgccagccgcaagaatcgtctcatcgtcagcgctgatatctagctggatgtcgtgatcacgccaatagcgcttggcaaagtaggcgtagcggccttttacctgtacgtcgccacagtagaagttattaaattctgtcgcggtttggacgagcgcaatgtcagtcggtttgctggttaatgggtacaacatgcgataagccagcatgcagccaattttcaagcttgcatcgagctcgtgggcaaacttggtcactaaggcactggcgacgaattggtggtgtagtgcttgcaggcgcagctgttcggagtcgacatctggactgatgaagcgatcagaatcgtccacatacataccgcctgccagataggcacccatgggacgagtgagcatgttaatttcgttgaaggttagccagtatttgacgtcttggtgatagcggttgatgatgactttggcaaaccggacgtaagcggcaatcatatcgcgagccgcccagccattgaaggcctttgttaagccgattggcgattcgaagtgggaaatcgtaatcaaaggttcgatgttgtagcgtttgagttccgcaatgatttgatcgtagaacgccaaaccggcctcatttggctcggtttctaatccggttgggaaaatacgcgtccaggcaatggagaaccgatagagcttgaagcccatttcggcaaacaaggcgatgtcttctttgaagcggtgaaaatgatcaatggcttcatgacttgggtaaaaggcatcagggactaactcacgggtcgttttacgcggggtgttgacatcgccgcctagtagcaggtcgctagttgagagccctttgccgtcagtttggtaggcgccttcaagttgattagcggcagtagcgccgccccagaggaaattttcggggaattgttggtttgtcataatttttctccttaacgcgttcactggctcagaagcctgcacataaggtggcttctgaccgcggctgttcacgctctgtcttacgcttctgaaacggcttgggtgacgcttaacaagtggtcgtcagtcgtcacagtcgctttttcttgaatggtaatccggtcagctggcgtatttagcaacaacaccataaccgttggatcgaagccttcctgttcgatcagtttcagatcaatttgaataagcggttcgccagcagtgacgtgttgatctgtgttgaccagcgttttaaagccgcggccgttcattttaacggtgttgatcccaacatgaatcaaaatttcttgaccggtggctgtggtgaggccgatggcgtggccggtgggataggtcatggtcacgacagcatctactggggccacgatgaggtcgtcttccggagcaattgcaacgccatggccgagggagccggaagcaaaaacatcatcattgacatctttgaggggaatcagttttccagtaaccacacttttcaggctttggcacttgatggctggctcgttcgtgtcggcaggggtctttttctcgacaatggcaaagagataggttgagacaaaggttagaccgaacgcaatggcaacagtgaaaagcgcgttgcggaagttggcgggattattgccgatgaaaactggcaaggtgaaaatgccgggtgagccaaacgagtagcgcacgagaccagtgagtccagcgaaaaggccagccaagccgcctgagaccatgacgcaggttaaagcccgtttgtatttcaaggtgaccccataaagcgccggttcggtgatgcctgacaaggcggtcacactggcagaaagcgcgatctggcggccacgtgcctgcttttcacggaaggcgatggcggctgcagcaccggcttgggcaatattgctggcgagcatgccggggcccatgatggtttcgctgccgaacctggtgattgacagcgttgctagcggcaacaaggaaacgtgcatcccgaccatcacgagcagcggggtgaaggcaccgacaacggttggtaccagccatggggtgtgttggttaatgaaggtgacagcagtgtagaggccatctcctagcaagctaccgatcgggccaatgacaattagggcgacgggggccgttatcagcgcgactaataatggtttgagcatggttttgataatggtcggtgcgattttttcggcgaatcgttcgacatagctcatgaaccagacgatcagaatgatggggatgacgctgccaccgtatgaagcgaggcggattggtgcgccaaacaaggcgatgggtttgccggctgcgaccatcgcggtgaagttcgggtgtagcaggacgccggccatcatcatggctaagtaagtattggtgttgaattttttggcggcactgacggcgagcatgaatggcagaaagtaaaaggccgcgtcggccatgaagctcaaggttaagtagggaacacctttaggatcaaggccgaacaaggcgagaatcgcgatcacgactttgaacatgccgcctgcgatcaagacagtgataattggtgccatgatgctgacaatggcattcaggacccgttttaaaatgttcttttcataatcagcgctgggtttggtgccatcaccagcttcgcggatgtgatagtttttggtaatttcggcataatatttagtcacattggcaccgatgacgacctgtgattcgtcgcctgagttcacggcactcagcacttcaggcatttgctcaagtcgctgaatatcgaactgggttttatcagccagcgtgaaccgcaatcgcgtcgcacaatgattgagtgttttgacatttttggtaccacccaccgctgccatgatacgatcggtgattttttgatggtcagacatgttgtgttcctcctcggatagtgagcgcgagccagcgcggttgctgcgcttggggcgcgttatggttggggtaaggcatgagagatgactagttagttaaaactcggtggatatgaataatgagataagccaactcttccttagtcggttctttgtcatagatagcaataatggctttttgaactttaagtgcgattttggccgcttcaggatacacagtgtagacacttgtgagtagttggccatcatcagcgagcatggtatcaccaaggtaacgctcagcaaagaatttcatatgggtgacaaagcgttcgtaattcaaactcgtcgtgtcaatcgtgccaccagtcagcgcacgcaccgcctgcaagacgttgtcaacaagctgggtcacttccaaaatattcgctttaccggccgcggctggtgttgcattgatgatgtggaaggcaatgttagccgcttcttcccgtgggagtgccaattgcaaggtcgcttcgacaaccgtcagcccatattcgccaatggcaaacatttcggggtagtaggttttcatttcccaataaatccgattacccagtgattgcttgctgtgatagcgctgaactgaaaaagccagatgatctgttaaggcgtagtagatactgggaagaagggacagctgcagttgctgctcagcatacgtcacaatctgtgaggtaatgctgatgtaaacaggtggtatgttattgagcgattggatcatttcgcttttgcgactgtcatccagcggcatgaattttttgaagatcgcgttgtcgggaagacaggcgttcactttttgacgatagccaatgcccttgccaaacgcgatatactcgtggccgtcctgttcagcgaggacgacattgacattgagcacttttttgatgcgaaacatcggacacccctttcataagtcgttcgtgtgatacttgcgggccgccactgaccgcaagttttgcaaaggacgcgtgccagttgttgcgaagcgcgtgtttggtggcacaaaaaagcaggcagactgaagaaaatcgtttgcgatgaaacgataatccaagtcttgcctgcataagcagtaacatgcgcttgtgatgcgttatctggtcaatgtattttagcatgatgactatagaaaacgcaaccatttcgatgaatgaaagcacatatttttattattttatctgataatcattaatattttgattcaggaaagattataaatatgaatgtgattatattaaagactggttcagcacgtttggggctgaatgatcgcttaagaacgctttcgaacaaaatcgttaccctttgaaaaattgagcttttttgtcagcagtcggaatttaagatcccagtgccaaggcggagcaatcgtaggccagatggggctcagccgtgcaaacagcacagcgacgggctttggcgctgatgttgttaggcgacttcgagatcgcggtttttgcgagctaaaagcgccgtctccgctctagctacgcgtcgctaccccagctggccggagatggcggagtttggcacggcattgaattgattagcacagtttgttattgccacattttccgaaagcgagcgggccagttaaccaaaacggcatgtttcccgtttcgcggccagtattcaaggaaagcgagggcaattaagccgattaacccaaggcttgtcacggtccagccagctttgatcccaggggtgtgataactcaaggtgaatttcaggcttgctgaagggactttgagtccgatgaagccgcgatagttttggattttcacttgcttgttatcaacttgccagcctttttcataggggatggttaacatgatgtagccgctgttgttttgacgggtggttaaagtgacgctgccgtttttgacgacttgcttaggcgcgtgttgctttgccgcggcaaccgcctgttcgaatggttggcgattgagggtatataaagcaaaatgatcgagatcaatctgatcaatgttgcggttgaacgttaaggtgacagttgtcggtttttccgcgtcaataggtaatgagaccgttttgctgccattgtcaggatcgtttttgagcggcacattattgatgctgatggccatgtttttgcgcatattttcacccatgaccaagtaacgctgctcggtactcgggttgacgtttaaggtaatcgtcgcgccgagctttttatcctttttggtggcaatggcatttgtcaaagtggtcaacggcttcacgttgtcaacggtgatgccggagaaatcggtggttgtgaaaattgcgccgatggtttccggtgtgaaggtgctgaagtaggcattttgttgaagtacgggattagcttgcacctgtgtcggtacttttcgataaatctgggtggccacagggagcgcatcaggattttggtaaatattgaaataatcgttatgaccgatcaacttgtatgccggtaaatcataacgggggttgtcaatgattcgagaagaaatctgctggtattcaggcgttgtcgttttcgtgctttgcgtattgaccagcaacagttgccggacaccgagcaggctttcgagcggccaagtcagatcgttgtttttcacgcggccggctgagccaatggcaccgacattggttaacgcattgatcgtgctagtgttgaggacggatgagaaggtgctaataccgttaaaattgtactgataaggatcgtccatggaccgctgggtatcactgtttacccggtaaaaagtatttggcgccagtgttttcgcttcggtgtaagccgcgttaagcgccttgcttgtaacggtgaagtctgcttttgagatgaaactgatggctttgagactcgcgtatgcattggcgcccatatctagcaccagcaaggttaggagaccgccaaccacccatttttgtgggaacaggtgatgcgcccaactatacagtaagatggccgctactaagagtaagacgccgccgaggacgaggttggtcaaggtgacatacttgtgactgcccatgcgccaagccgttgggatgaagacgaccccgccgacaaccacgctggcgataatcattcgtagacgtgagactgacggcaggttggcgagaccgcgtaaaccgagcaataacaaccaaaaaatgacaataaaagaatgccgataaaggtaccaaaccggcgcgcgaaaaccttgccacatgatgacaagcgggttgagccaaatggacagcatcagaatcacagtcatcacgccggaaatcaaacgctcgcgaaccgagattgctggagctaagaagtaaaagacagcgcctaagagggcgatcatgcccatgtataaattgggcaggccatttgataactgcgcaaagttgaaactgccaggaatcaattttgacggcagatcgatcagcgagaaaagtggtttgatggtgaaatccgcaccagcactggaaagacgtgaggcacttaaggccagataagtggggatcaagacgatggcgccgatcataccgctcagtaacgacccgccgacgaaaagcgcgattttgcgcagcagttgaggctgatggtgactcgcccattgccagcagaaatacagcgccgagaaaatggcgaccatgaaaccaatataatagttcgtgatgaagcttaggcttaatggcacaacataggggatgagtcggtgttcttcaaagaggcggtcaatgcctaaaatcacgagcggcaataaaatcacgccgtccatccacatgatattcagaaagttggcaatcaggaagccggaaaggccgtaactgacgctgaagaccaaggtgtaccagtttttgccatagcgatggctggccaatacctgcgcagcaagtgccgcggtgctgtacttaagcgcggtcacaaacaacatggccacgggaatggcttggcgcgatacaagcacgaagatcaagttgaaaggacttaacaggtaataggtccaatttgcatacatgccgccgccaagactgttggagaaagaataagctttgccagctgtgcccattaaggcgtgtttcagataagtaaagaaatcaacatattgaacggctgaatcgtttgccaaaatagatgacgagccaaaaggcgccatttttaacgcggcgaaaacgatcagactgatggtgaaggtcatgctgaaactgatgagcaataatggccatgttcgatgctttttaaatcgcgacatatagagagggactccttcgaaaattcggtagggtcaaaagttaataaacaatatgatagcagaaaaaatgactgacttaaaaataagcaagtcttgaatattaacttaatcataacgcgtctttgaactgaaaagtgaccggaagcgcaatgaaagcgctgtggctgctattttaaaaaaaaacgtagcaattggtgatacttgtgacatcgggtggtgtggtcaacgggatgaaaataatcttttccggtaagacaaacagcatcggggaacggtacaatagaatgaaagttattttgggaggacggtttatgcactcacagacatcatcagcaaagctgaagacatttatgacacaaaatgctgtctggctgttgccgattttggcgatggtcttggttttgctcgtacagtggccgcagctgcatctaccctatatctttcatcaagacgatacgatgccacagctgcggcggttggaaagctatgtgaccagtgtgcggcacggccagtattttcccaaggtttttcctgaggcagtccgcaactttggctatgcttttgacgcgtactatccttcattaatgttgttgccatatgtgtggctacggctgatggggatgggggtggtcggtgcgtatgatggttatcaggccctcattctcatcgccacagtattggctgcctacgctagtttcttgaaaattcggcgaaaaccgctggcggcgtttgttttcagcatggtgtatacgactgcggtctaccgggccttagacgcctttgtgcggggggccttgggtgaaaatctggccttcattttcctgccgatcatcgccgcgggcatgtatgagctttacgtcaaacgaaccgataactggtttttactggcgtttggtgtgaccggtctgatgtatgcgcatatgttgtcgctggttatggtgctggaatttttggttggcggctttctcgtgttggttggcatgcggcgcgtgacttggcgaatggtcaagtacacgatactggcagcgctcagtacactgctgatgggactgggcagctacttgccgatgattgagatgtccaatcatattgcgttgaagttaagcgagtctgcgacgatctggccgaacttcatcctctatagtttgggtgatctttttgagaactccctgagtatgtatgcctcaaccagtaatatgcagaatgtcggccaagcctttcgacctggcatgggcattttcatgttaatgacagccattgtgctggtgattcgttggcggaaattgaatcaagcggttaaggtagttgctggcctagggctgttgacgatctttctaagcaccaatttgttcccgtggtcgttgtttagcaaaacgatcttcggtgtcatccaatttccttggcgatacttggagctgacgactttatttcttagtctggcaattgggttgatcgtggcggatcgtccagcctcatcacatgttgcttgggggctggtgctggcaacctgcattgtcggtttcagttatgccgtgaatatcaatgcgacgatgcttaatgccaacatttatcgcatcaccgatgagaatgcaacggcttattatgaagatgcaactggcggcgggagtgagtatgcaccagaagattttgattcaacgactttttttaaaaagacaacttattcggtaacggcttctcatcaattgacccggctaacgatgccaacccaaacttacaatgatatgcgttttacctataccagcagcaagccggtgaccctgaagctgccaaaatttggctacgtcggttatcatgtgaccatcagcggtaagacagttgactactggccaagtggcaaaaatgctcagatcacgataacggcacaagcaggcacgcatcgtgttcgagttgtctatacaggcacgacgctgcaacatgtgaccggctggctttccttagtggctgcgtttggctttggcggctggtggttgttgcgtgaaacacgtaggcaacgggcaacggatgagcggataacggctgggtctgaataatgaaacaaaagagattcttgccgtgccaaactccgcaatctccgaccagatggggctggcgacgcggagctagagcggtgacggcgcttcgagcccgcaaaacccgcggtctcgaagtcgcctaacaacatcagcgacaaagcccggtcgctgtgttgtttgcccggctgagccccatctgacctacgactgctccgccttgccaatagtatctttaaattctaataaaaatatccgtgaaaaaaagcaaacaattttccgcaataaggagttgtttgcttttctttagtagcactggattatgtcctatgtcccagctcaatcatttttaaattacttttgactatgtgacatacagttacttgatctcacgtgcgataaaaatcgggcgtcgtttggtttctaagtaaatgcggccgatgtagcggccaacgatgccgagggcgaacaactggaggccgccgatcatcagaaagatagagaccattgacggccagccagcggtcggatcaccgtaaatagctgcgcgaacaacaatgaagattaaggctaaaaacgagccaacgaaactgacaatccctaggatggagacgaaagttagcggtgcttcagagaagtcgatgatgccatcaagcgcgtatcgcaagagccccatgaaggaccagctcgtctccccatgttgacgctcgatgttgcgataaggcagatactttgttttgaacccaacccagctgaatagccctttagagaagcggttgcgctcggtcatttgaatgacagcttcgacaacctgtctcgtcatcaggcggaaatcccgtgcccctggcacaatttgagtttgcgagactttattaatgaatttatagaataaatccgagaaaaatgaacgcatccgagcttcgcctgagcggtcaatgcgttgagcaccagccatatcatagccgtcttgcaaggcggcatacatatcaggaagcatcgctggcgggtcttgcagatcagcatccataacggcatagtagtctgcttttgcggtggagagaccagcatacatggccgcctccttaccaaacgagcgagaaagatcaatgaagtgaacctgatcgtcttttgcttgtaactgtttgatctgctgaagggtatcgtcacttgaaccgtcgttgacaaaccaaatttgggcttgtaacgcggttaagtcgtcgcggaatgttttaacaagttcctgatagatcagcggaacattttctgactcgttatgacatggaatgataattgccacactttgcggcatgggaaagcctcctgttttgcgctaatttgatgatggctgaaaaaatactttggcgtgccaactcgcacggtgccgctataacagagctaatctcgcatagacttaatcgcttttgctagcttagttgtttgactggtgacggttgtgagattggccgtcatgacatcgatttgttgattgagtgaactgtaatattgattcagctgagaaatttggctttctaagtcatcttgtgaggtgtcactatctgcggtggtggagaagaaggtatcctcagccgttaacatttcgcggtaataactgaccagtgttttgtgatctaacttggcaagtttcagacttgtgagaacgttattcaactgtgtttgcggtgtatcctcagatggctgattgttgagctttgtcaacgtattatttgccccaaccaaagcgctgttggcggcttctagtgatttaaacgccgcggcacgcctatccaaaagttttttgacagggccattttctttttttaaatcagtttgcggattttcctggtaagccttttcaaaagcagaaggaaaggcgtttaccgttgatccaatcgtctttaacgcatcttgttcttgctgcacctgcgtttgaacggtggcggttgtggtttttaactggcttttaggatttaaagtcgccgagcatccaacaatcaagactgccagactggctaacaaaatgagtaattttttcatagcagctcctctgtttatatggtagcgtaaagcccgattaaatactagcggggcgtgacgagtacatgtgttgactattcattaaatggaatgttctatgctaaactgactctggagggtgatggccatgcacataggtatgcgaacggttaaaacggcagtggggacggcagcggcaatgctgattgcttacgagttgcatcttgaatattggacggccgctgggattattacgattttatcagtccagaatacgaccaaggcatcatttcggctagtcgcgtatcgcttattggcgaccgtgttaggttttgtgattgcgatcggtgcatttttggtgctggggtacaatgcagtggctttcgggcttttcttactcattttcattcctttgaccaacgtgtttgcggtgcagagcggtatcgtcatgaccgcggtgctagtcactcattttatgatggcgaaaagctgcagctggttctggattaaaaatgaactattattgctcgcagtgggcgctggtgtggcattgattgccaatctgttcatgccaagtctggaagccaaaatcactgagtttcaggcacaagtcgaagccgagatgcgcgagattctcgatcatatgagccagcaattgggtccggatcacattaaaagtgcggacaattgggcgaatctgtcagatttgaaaatgaccttagatgccgctgttgcttgggctaatcgccatagtgacaatcagttgctggccgataatgattattttcaagcctattttgaaatgcgcgacaatcaatatgagttgctccggcaaatgcaagacagccttgaccgtatcgaaactcctgtggaacaagcagccgtcatcagcgatgccttggcgatgacggccagtgttctgaccgaagacaaccccgccacacaattggtcaccatggtcaaaaaaattcaacgcgattttgctaaatcagcgctgccaacagaccgcgcaagcttcgaaagccgcgcgcgtttgttctatttcctagaagacttttcccgcttgttgcagttaaagcggaattttaacaatattatttcatcacagaattgatttgcggtttcctacatgtcctaagtcatttaagttggaaaataaaaaggggcgtttaatctgatggatgtcaaagtcataaaactcggtacctcattagtgccaaaaattaacaacccatatgctgaggctaaatctctttcactttatcaacccgaagagtgggctgatattgagcacaattttcgctgatgtcccatcgccgcaagcaaggtaacgatattccagttgattctgtctctcaaagtgacgaaaattcaataatggcattctctgatcatttgagcaatcatgagtacaacagagtagttgcgtcatcggtattctaagatagaaagcaagagctggcggagcggcgagggggctcagccgtgaaattgttgttggcggtttaccgcctacaacaaggccagactttgaaatcgcgcggggtttgcacgagttcaaagctgtgcccacagctctagcttcgcggtcgccagccctcctcgccgcgtagccagctcggactaggggagatacttgactggaatagaactgaagagaaacgtcgtttgcattgcaaaaacgcgttcgcaggtttctaatcgcgcctgctcacgctcttaaacgcgatcgccaacccagaaatctgcgtgtaaggaccttggatgcaatgaccagagcccagtcatcacatccaaggccgcttacactccgatttctaaccgggttggctcacgctctatacttgcttgccgtttggcgtgatggtagactaaatatgtactttttgaatggtcgtggttgcatggtttcagaactttcttccacttgtaccaaacagaaatacacgatattatcatgcgtcagcagacgcaaggaggaatgttctcatggaacacggcacagttaaatggttcaatgctgaaaagggttacggttttatcactcgcgaagatggtagcgatgttttcgttcacttctcagctatccaaggcgacggctacaagaccctcgaagaaggccaagcagtcacttttgaagttgaagacagcgatcgcggtccacaagcggttaacgttaacaaagactaatatgaaagtttcagagctggttgcagagatgcaaccggctttttattttcgcgtgtgcacgaggacagatacaggtaaaatgggtgagtagcgatgttgcgtaccggcatcaaataaaagtggcggattgtctgactttttctaaaactcatttggcaggtgctcaatgcgtgtaagtgcatgttaaactagttcatagcatgttaattgaaacattttttggaaggtggggaagggctgcatgttaagatttgtgaaagttgcgccggaagctcggttgcattatttggatcttttattgattggggatgaggatccgaatatgttgcggcggtatttggacgctggcacgttatttgcagcgattgacgagactgtgccggttggcgtggccatggtagtgcctgtggatgctaccaccattgaactgaagaatcttgcggtactgcctgcccgccgtcgtcaaggtatcggtgcgagcttgttacggcacgtcggactggtgtatgcgcctgagtatcaggatatgctagttggtactggtgatgtggatttcgagaatctgcgtttttacatgcgccagggattccggtttgacgcgatccgtaagcatttcttcgatcagtatgcccatccgctgtatgcagaagggatgcagttgcaggacatggttgtgttacgacgacggttgttattgacaagttctgataaaacaaaggagtaatgcttttggccaaaaggcgccgacattttacgttaaaaataattccgcttgctgcttggctagtcatcggtttctttgcgatcggtgtgacgcttgtggttggttcatactgggcccaacaacaaacagaagtgacgcaaaaacaagaagttgcggatgaaaaggcggcagtacgcgcaaaaaaagttgcctttattaagcgcttggtgccgacagcacaggccatgcaaaagcaatatggtgttttgacaagcatcaccttagcgcaggccattttggaatccaactggggtaccagtgcattggcgaaggactaccataacctgtttggcatcaaaggtaccgatccagccacgaccaaagtgttgcgcacgcaggaatatgtcaatgacaaatggatcacggtcgatggccgttttcgggtgtatgacaacgacagtgaatcgatccgcgatcatgcgctgttattcgttaatgggactgattggaatccacaacaatatgccacagttcgtgccgctaaggactataaaacagcggcagctgctttgaagacggatggctatgctactgatcctgattatccacaaaaattgattcatttgattgaaacttggaatctaacccaatatgatagttgaacgttcgtgttttagtgatgcggcaatcctcgttattttgactttttaaagccgaatcacggggattttacttattcttttgatgaaagcggcttcgcgtgtttgttcgggaattagcgtgattgtgttgttccacactgatttttatggtaagcttgttgaaaatttacaattaaaaggagtgcttgtggtgaaattactggaagaccggatcaaaaaggatggccaagtaataggaacagatgtcttgaaggtggataactttttgaatcatcaggtcgatcctgatttaatggcagatctcggtcatgaattctaccggcgcttcagcaatgagccgatcaccaaaattctgacggttgaaagttctggcattgcgccggcgattgcaacggcaatggagtttcacaagccgttggtttttgctcgtaagcataagagcttgactttaaaagatcatctttacacagctacggtctattcgttcactaaaaagacctccaatgagatcgctatctctcgcaagttcctttcagccgatgacaatgttttgatcattgatgattttcttgccaacggtcaggcggtcgaaggtttgatggatatcattgcacaggctggtgcgacactgagcggtgtggggattgtgatcgagaagactttccaaaaaggccgcaagttgcttgatgaaaagcacgttcgcgtcgaatcattggcgcgcatcaatgcatttgaaaatggtcaggtcatctttgcgccggaggattagcccacgatgaagaataaagcgatttcgaatcctaaagcagccgcattgggactgcagcatttgctggcgatgtattccggttcggtgttagtaccaattctgattggtgcttcgttgcattttacgtctgagcagatgacgtatctggtgtcgattgatatcttcatgtgtggtatcgcaacggctttgcaagtatttggcaacaagtattttgggattaagctgccagtcgttttgggctgtgccgtccaagcggtggcgcctttgatcatgattggccagaagtttaattttcaaacgatgtacggggccatcattgttgctgggttgttcgttttcctaatcggcggtgctttttcaaagttgcgtttcttgttcccgccgttggtgaccggttcgttgatcacggtcattggcttgtcgttgattccggttgcttttcaaaatcttggcggtggctcaacaacggccaaggattttggtaacatgaccaatctgatggtcggggccttcacggtacttctgatcttagcgatcaatgtctggggcaaaggtttcctgcattcaatcgcgattttggttggcttgattgctggtacggtgcttggcggttttcttgggttggttagttttcagccggtgattgaggcaagctggttccacgtaccgacgccattttactttggggtaccgcagtttgagtggagctcgattgtcacgatgattttaatttcgatgacatccatggttgaaagtactggcgttttcttcgcgttaggggacattgtcggccgtaaaattgaagcagacgacctgaagcgcggctatcgcgccgaagggttagccgtgatgcttggcgggttgttcaataccttcccatacaccactttctcgcaaaacgttgggttggttcaattgtcagggattaagacccgcaagccagtcattttttccgcgattttcttagtgattcttggtttactgccaaaaattggcgctttagccacgattattccagcaccggtgcttggcggggccatgctggtgatgttcggcatggtggctgtgcaaggcattcggatgttgcaacaggttgattttgacaatgataagaatttgcttgtcgctgccatttcgatcggtctgggacttggcgtgacagttcagccacatatcgttcagtttttgccaaaaacaattcaattgctgtttgggtcaggcattttaatgaccagcttgagtgcggttttgctgaactggctgttcaattcgccacgtcggacgcaagaaatgtcggttgatgaaggcttgaacgaacgcgattcagataaataaagtcaaagcgaggaacagatgtgacgcaatttattagtccaggtgcaacgattggcattatcggcggcggtgtaactgcttttcaaatggcgaatacggccaattcgatgggcatgcgcacggtcgttttggcgccgacacaaacggatattgcttttgaaaaggcggatattccgttggtgggcgatgccactgatcggacagcgctgaaagaactcacgcaattaagcacagtgatgacttttacagatgagaatgtcgatggttcgctgctggcggaattagccactgccaaccaattgccttccggggtcgacattttgactgtcacccaagaccgctatttggaaaaagtctttttggacgatctgaatatgaacattttgccttatacccaagtcattacgccgaatgatattaaagaggctgttgacacaatcggttatccagccttgctgaaaccgattcagaaggggatgggcgttgaccagcagttgctgctgtccacggcagatgacgtcgcgcgggcacagcagttgttgcaacagcgaccatatattcttgaggcttacttacaagacatcaaagaagtcgctgtgatcgttgcgaaggcgggatcagaagtgcgcatcggcccggtcatccagaattattttgatcgtcatcaactgaaggcttcatctgtgcgcgccgatgttgatccagcagtgatcgttgagatccggcgtatcgctgctaaaatttcagagaagttagcctatacgggcatctttagtcttgaatttttcttagccagcaatgggacgctttatgtgaagcgagtttatccagggccgaaattatatggacatctgatgctgaatacgagtgatatttctgaatatgagctgcatctgcgcgcgattctaggatggccattgccggagttgcaattggccgaggacggcgttggcattccgctgcgttcagaagatatggacgcggttttgactcagattcaaattaaacctgattggcgatttacgttttatccgactggtggcgagctaaccggcgagattcagatcgtgggtgatttgaaagcaatcaaagccagtgtgaatgcgactggccactttgtcattcaatgatcgcgtgctcgcagtcgcaaaccaaggatacctgttgttgttttgtccacttgaaggaggaaaaagcctgtgattccgcgttatagtcgtcccgaaatggccgcaatctggtcagagaagaaccgttatgctgcatggctggaagttgaaatcttagctgccgaagcctggtccaaactaggggaaattcccgctgctgatgtccaagcattgcgtgcgcatgctaagtttgatgttgatcggattcatgagattgaagcggtcacgcatcatgacgtggtggcattcacgcgggatgtttctgaaagcctcggcgctgagaagaaatgggttcattttggcttaaccagtaccgatgttgtcgacacggcacagggctacctgttgaagcaggctaacgagattctgcgtgcagatttggccgccttgaaggctagtttagcaaagttggcgaaggcccataaggataccgtgatgatggggcggacgcatggcgtgcacgctgaaccaactacttttgggttggttgttgccacgtggtattctgaattgaagcgagacatccgtcgatttgaagacgcggctagtgatgttgaagcaggcaagattagcggtgcagtcggtacctttgccaatacaccgcctgctgttgaggcgtacgtcacagagcagttgggtattcgcgctcaagaaatctcgactcagattctgccgcgtgatctgcatgcgcattacattcagacacttggcctgattgcgacttcggtggaacgatttgctttgcagattcggcatatgcagcgtaccgaagttcatgaagtcgaagagcatttcaacaaaggtcaaaagggctcgagtgctatgccacacaagcgcaatccaatcggttcggaaaatgtttctggcttggcgcgcgtcattcgtggatacgagacgccagccttagaagatgtgctgttgtggcatgaacgcgatatctcgcattccagtgccgaacggatcatgttgccagatgctaccgggctgcttgattacattctccatcgattcaccagtattttggacaatttggatgttttcccagaccgaatgaaagccaatatgaatctgacgcatggcctgatttacagccagcgggtgatgctgaagctgatcgaagctggcttgagccgagaacaagcctatgacttggttcaacccaagacagcggtggcatgggatgagcatcgcgccttccgtccgttgcttgaagctgatccgaaaattactgatcggttaagtcaggccgatttagacgatgctttcgactaccactatcacctcaagcatgttgatgagattttcaaacgagttggtttagcataagcaaataaatcaaacaaaaacggcgagtgcagactcgtcgtttttgtttggccgcattttgtgccacctgttgaccatagaaaaagtcctgttcaagttgtgatagcaacgagaacaagactcattttgtcagggcactcagcgtcaatacaggcggttcctgccaagcatggttaggattcgcatttaacaaggattgatctgttgttaaaactagcaagcaactattggtttgttgcaatgcatgattggcttcagtgaggaagtcacgggtaacataaggatcaaagatcgcaggagagctggttagcagcaggtaacgttttttacccatcaagccacgataaaattgcaaataaatgcgttgcatggtgttcaatgtcgcagctggctggtctaagatcggtgaattcgtggataaccattcaggcaagaaatcagaatccttgcagcgcccattgatgcaaaggttgtttcgcacgctgagatagtcaaggatacctgtatgccggctattaatgaagccgacttgcttgatgacgccaccattaataaaatcgcgcacgtactgatcatgcaaggcaatcaggtcattctcgtttgaggcatagagatactgaatcgttgttggggtaaaaagtttggcaaaattttcgcgatagatatcaagtagttttgatcgaaataacatggctgtctcctaacgcggtaaggcacgccttttccgaagcatggaaagtggtgtgaccaaacctatgttggtgatgaaaatcacggcgagaccatttcccagtgctgacaggaaaccggttggctgtgtcatatcatcagttttgctaccgtaataaaagagggtttcacgggtaaaaccagtcaggtgacgggcaaagagttgctcaaatgcgtggttcatttcgatgctgtcatacttttgttgtagcagatgggcaaataccgaacgatttgtgttcgttaagaaataaatcaattgatcatttaataaaaccacaagaaaaatactaacaatgaagctaattaaaaagctgaaaattgcttcaaaggcgtattgtaagccgatcgacatactgctttttccgactaaatacaaagcatcagtttcagaccgtcgacgccgccatagccaagcagtccctgcaagccacaaaagaccgtcagcaaaaacaactttggtcagcatcgactgagcagcctgcaccatttgaatgtgggcttgtccgacctgcgtactgagcaaaatcgtctgcctattttgtgtcccaaatgagttcaagcgttgcaaaaaagctgtctgagcagattggtcaatcatttcacttgtcatcagcatgatgctgatcaagcagaacgccactgataacagcatcatcacaatataataacggcgatgataacgaaatcctgaaaacgttcgctcaaagaaatgcatctacccgttcacctcacaagcagtataagcaatgaatttgaacaaagtgtgaacataagccgagcatttactatgttatttgaatttatttagatggttgggttgtgacattcacatcagacgaactgctagattcgctgctgctggaggcttcagtttgatcctgaactttatctgggaaggtggtgatgggatcagtgtcgtcggctaattcaggagcatcagtttggtaaagtccagttgttgattggtcattattttcgctatagagactggtgctcttgctgcctagattgcgttcgattgataagacattgctgagactctgattgtagtcatattggttagggttgacgggtttaaagccaagtggcacgtagaagcgtaagagattgcggttagcgacatcgtctgaaaggctgagtcttgtgtccactgacttctgatccttggcgatggttgcttcaagcgcaggcgtcaatgtcagcagtttaccggttgtattatcgtagactttactgccaagtacggtgtatttagaggtgacaaaattgtgattacggaaggcaacaacgctgtcgtgctgactggacagcagatcggtgccaaattggacataacgcgagctatcaatgcctagtaagtgaagtaaggtcggcaagacgtcgatctcgccgccgtgagtgctattaacgccgcctttaagaccaggcatgtggaaaatcagcgggacgcgttgcaactgagcatcatcgaacgcattccaagtgctaggatccttgccaagcaacggtgccagagtggtattgcgatcattactaataccgaaatgatccccataaagcatcactagcgaattcttttccaaaccgcttgctttcaaatagttgaagaattccttgagcgcttcatcaagataatgagccgtgcgaaaataaccgttgatcgtggcgtcatcagtaccggcgtcaggaaaatcggaatcagcttgggtgatataaaaaggattatggttgctcgtcgtgatgattttggcatagaaaggctgttgcagatgctccagatactttggtgtctcggccatcatcaacttatctttaatgccatattcagtcgctgctttttcgtcatgattataaaagttgccggaaaagtagtcgttataaccaagactcttgtatacattgtcgcggttccagaagctagcagagccgccatgaaaaacagcactggtataaccggctcgttgattgagaatggccggcgctccttcaaacgtattttcagtgccgagactgctgaataaagagccattggcaatcccaaacgtgctggtttctagcatgttttcggcgtcactggttttaccaagaccaacttgatgaaagaagttgctaaagctgagtgtgtctttttctttaatgagtgaattcaggaaaggcgtgacttcttgaccgtcaattttttggccaatcaagaattgttggaagctttccaaatgaataagaatgacatttttgcctttggccgtcccaaaataactggcgttgggagcggcataatgcgaccgcgtatattgcaatactgggtcaagattcgaactgtcggcttgggcgcggacctgattgttctgggctgttttggcagcatcgtaaacggtgaatggcgccaagccgagatacttaacgatataattccgatcaaaagtccgcgtcaaaagttgcggccgattcatttcactaaccgccatgatcaacccaaacagcgcgatcccaaagacggtgaccgcttgcggaaagtgaaagggaagttggcgggtatccaacgtcagaccgaaatgcggccagcgcaaaggctcgttgtggatatagcgccagatattccaaatactgtaactaaaataagccaaggccacgagcacaatatcaattacataaatgatatcgtgtggtttaaccatgctaagcgagctagctccaagaccctgactcactttagagacgccaaggaccgtgttgatggtcagaaaatctgaaaactcacgataatacagaacatttgcgagtaatagcaaagtgctgagtatgtaaacaatgacgccgatgaggtaaccgcggcgcgcatgcttgggatacaagccaagtgataggaaaatgatcccagttcctaagggatttaataatagcaaggtgtattgtagcggatcatttaagccaagtgaaaagtccacaaagtaaccaaagatggtcttagcccataccaaaaaaagcagacaggctaaaaagccaatccgggttgatcttatccactgtgcgaggcgatttagtcgtaaccgtttcaaagcggcaactcctttccactttgttctttgtcattgtacccgcaaaaaggaggaagcacaaaagcagggtctgaaccaacctggttttgggggtggcaagcgtgtctcaatatctgaaaaatgagctgtgcttgcgagcgtgtttctgaagcaactgcaaaaggcctgattaccattttgcttagacccttatgtgttggtttcttcgctgctttgggacaatgacgcgagaacgctattttagtgctttttgatgtcccacgccggcctcccgacatattgatgaaatgatattaaatcgtgattccgtcgctggtatcatggcaaatcatgcaatgattagcgtacctcattttcctaatggcagagggtgatgctcatcattcttacagagtctttaaaagttgtaacacattgtgggtatccttcagtcactttgctacaatgacaactggaggtagcacaatgctgtttttggggccattttacaactggattaatacaacctcgctcagtcgcgtcaaccattttcctttgattcgattgattgtttttagtttggacaaaactattctatacctattgatctttgcagccttgcgctgcctttggctgttggtgacgaagcgaagaaccacttttgggcgggaattaaaactaggcatttttgtcggttatttaatgcttttatttgctttgacagtttttcgcgatgtgtattatccgtggcaactgcactttcattggaatcggccattatctgtgattaatatccgaccacttgttgaaacgcttaaattgcaacatgctgccagtcacttcgatctctggtatcaatcactagggaatattgcttggtttatgccgcttggctttggtattccttgggtgagcaaacatcgacggcgtctcgcgggcacggttatgtttggcctgctgacgtcgttaagtattgaaaccttacaatttctgctaatcagtggggtagcggacattgatgatgttattttcaatgtgatcggtgcgattttcggctatagcctatatcgcttgtttcatcatcgtaaataagcatgagtcgttttagtattcatcatgagttttctgtgtatcatgaaggtgagctgtctcttggaaatgctttagatcaggttgtgcttgtcttgccgtgggaaaaccgctagaatatttttttgtgttcaatttttttaaatcaatcattgaaatagaaagaggcgcgtaatgggatttttacttgcgctgattccagcaattgcatggggctccattggcttggtcagtggcaaactaggtggcaatgcttatcagcaaactttggggatgacgtttggcgcgctggttttcgggatcggcacgttgattgtcatgcgtccggtcttagatactaaaatttggttacttgggattgtttctgggcttttctgggcattaggacaaggccaacagtttcagtccatgaaatatatgggtgtctcaatgacgatgcccatttcgacagggatgcagcttgtcgcgacaacactggccggtgcgctgttgttccacgaatggcgtaatggtcgtgatgtgaccttgggcattcttgcgctggtattgctgattgtgggtgcaacgttgacatcaaggcgcgaacaaacagacgacttcacaacacaaagtggcgttgcaaaggggctgcgaaccttactgatatcgacagttgggtatgcaggttacacgattatcgtcaacgctgggcatcttggcgctttggccgttgtgatgccgcaatccatcggcatgattattggtgcgttattaatgggcattggccatcagccatttgctaaggcaactgccaaaaatattttgacaggcctgctttggggaacagggaatgtgttcatgttgttatcgatggccaatgttggtttagcggtttcttattcattgtcacagatgggaattgtcatttcgactttcggctcgatttatctgcttggcgagcataaaacacgcaaggaaatgatctgggttagctgcgggtcggcactggtgattctcggtggtgtcgtccttggcatcatgaaagcaaagtaatcgatgagaagttgctcgattgcttgcttttttacaaattcaattttaaagttaacttgttagagtgtgaatttgaacaaagcatgggtaactgaatttaaaagtttacttgatgagttatttcgaattaataattgaattgacgttttttatgaaaccactctcatatcgacttttgacagttacttatgtatttagaggaggaagcacacgatgtcgtacatcaaatttgattcatctaagctggacaagttcgttcatgccaatgaacttgaacagatgcagccgttagtgactgcagctgacaaggaattgcgtgaaggaacaggtgctggtaaggatttccgcggctttatcgatttgccagtcaactatgacaaggacgaatttgcccggattaaggcagcagccaagaaagttcaaggcaattctcaagtctttgttgcgattgggattggcggttcttatttaggcgcacggatggcggttgattttctttcccagactttccgtaaccttgaccctgatctgaagttcccagaagtttattttgctggtaactcaatctctggtacttatctggcggacttgcttgacattattggcgaccgtgatttctcgatcaacgtgatcagtaagtctggtaccacgactgaaccttcaattgcattccgtgttctgaaggcaaagttgatcgaaaagtatggcaaagatggcgcaaaggaacggatttatgcgacaactgatcgtgccaagggtgctttgaagcaagaagcagacgcggaaggctacgaagaattcgttgttcctgatgatgtcggcggtcggttctctgtgatgtccgctgttggtctgttgccaatcgctgttgcaggcggtgacattgacgaaatgatgcgtggtctcggtgatggtcgtaaggcatacgcttcagctgatttgaaggaaaacgaagcttatcagtacgccgcattgcggaacattttgtatcgcaagggctataccactgaattgctggaaaactacgaaccaacgttgcaataccttggtgaatggtggaagcaattgatgggtgaatctgaaggtaaggaccagaaggggatctatccttcaagtgccaacttcagtactgacctgcacagtcttggccaatacattcaggaaggtctgcgcaacctgatggaaaccgttgtctgggttgaagaaccaaaccgcgacctaaccattcctgaagatgctaacaaccttgacggccttggctacttggctggcaagaagatgtccttcgttaaccgcaaggcctatgaaggggttgttctcgcccacaccgatggcggcgtgccagttatgaccgtctccattccaaagcaggatgcctacaccttaggctatctgatctatttcttcgaagctgccgtttcaatctccggctacctgaacgggatcaacccattcaaccagccaggtgttgaagcctacaagaagaacatgttcgcattgctcggccgtccgggttatgaggatatgaccaaggaattgaacgcacggctttaatagcgtgggtttgaggtcgtttggataggaaaaaatgagagcctcaaaattgtgttgtaaatgttcgtgactgaattttgactgaatagccaaaagggtcaaaacatttatgtaccaattttgaggctctttttgtgtccgcgggattgccagtactggctttcttttggtgtatagactaaaaacacggtgtgatttcagcgggtgataaacgacatcgcgaaatcaagcctatatccatatattgacccaatatctagttggcatattaatatcagcggttgagaacgcttgttgcgaactagttcgtgtccgttagtgctattaggtcttagaaaagtgttttggcaatgctacttcaagccagcctcaactgaccaatccaactggctttttgagaccatggcaacagcgtgatattgtaaccctctgctgccgactgaaagcttggcgaaatattacgttccagatcgtttgcgagcaagtagaacttaatttcatcattaaatgaacgtacatctgtaattgaaaagattggttctttgtaggcatttccagttggattattcactagttttaatgccttagcggaggttgttttcgttcgaccaatcagaatctcaaagttgatgttattgccactttgacctgtgtatttaacatttgtattgaccgaaatatcgctgttaattaagaagttgacaacgtcttctagaaataagtctttggttctatctcttgaagttgcgagcatatcgccaacctgcgtgatgcattgaataagctgtaattctgcctgtgcatatttggagaggagaggtattttgatagctagctcaccagttgggcatattgaacgccgaaggaaaggagagtgtcattgaaatacttctttcttttaactgatgtgttcgtgtcaaatcctaaggttccaagttcgtccatggtataaccatcatcactcagcatcaaattgccatcagcgtctttgtataaaaccagagaaatattatcatgaaacatgtctggaaacggcgtgcgaatctcaatgaagtggttcttgtccttataagaaaacgatacatctaaccacttaatgcgagccctttttaaggcttcaattgttggcatgtccatgatttgcctctttcttgttctgtacgaagacagcctttgcacggttaaggatttaacgatgacattgtccaaacaatcgtttatggtgtttgattgaaaaattaagcacggtcattcatgcgcaatatttctaaatcctcagtcagaaattcattgattccagccaaaaacttttgaaaatgcgccgtcccattatgactttcaaccgcttcagcatctcgccaatgttcgataatttcatattcattcggagtggtgagactttgatagtgatcgtagctaaggttcccttgttccgcacgtgaaccttggaccaaagcggcgatgaattgccgatatgctgcatcacgatctggtttgacgacaagtttgacattaatgattttcattttaaatcctccattttttgtgtatgtcatatgataatggaagctgggtcgccaagaaacgttttcgatccatggctagcttctttttgcatcagtacttggtgcctattatacggagtgattcagattgtatcaattttaaaaagcagcgtacatgggcggtgtcaatgatgtgtttaagtctaaaaaatcaccatcagcacaaatgctgcgtccatgattaacaagccaaatagggccgtgatcctaccgataaaactgcggtgaccttgttcaagtgagaaggggaggatgtcttctttgctcgacggtgatatttcgaaatacttctccatcatgtgacgtgagattgtgtatgactgacagcttagataaatcaaagtgatggtgacaatcaccgttagccaagcgcttacacggcaaacggttgggtcagcgtagacattaagttggtagatgccagcaatcagtaaaccgatgcaggcactcagactgaataagttaaggcgaagcagcaaagcgactttttgggcccgtttcatttcttcaggaaatgttttcaacatttttgccgataacatgacaacttgataagaattggcaccttttgtcggacgttttgcttttatgactttaacgacaccagttatttctgtgatggcaccgattgttaaaagaagcaggataccgtcaaaaaagatttgatttgtcatcagggacctccaaaaactgaatcaaaaaagccgtttcgactgttatgacgtctaacggctttaagtgacgctgatagattttaattcttagtgcttgtcccatcagcatagttgattgtataaccaggttcaatattaaaaatgtaaacattaaaatagacttgattgtcaccaatactttgcgcacgcatctgaacaccacgagccactaattcattgccacggaaaattggtttgacttcgtagcggacataatggctggtactttgtttgaggtaataagcgatatccatctcatgagccagcatgagtggtgtattaagggtttgcgtgccggtcataaggttcttggggttgtttttttcgccggttaattgataaccaataagatggctgcgattgtacagccaaccatgcgcggttttcttgttgtgccagccagttgggttccatgtgagtggttcacgcttggctgttggcatgagtgatttatttaaaagcgcatttgcatctgtcacgcgattttgaccatcgagatcagaataagttgcccaagcacctttggcagtagatagatcagcatcagtgaatgcaggattatttttgttgacaatgatttcttgttggccagtatagtcaagattggcgagatcggacgctgtcgtggcagcagcacttgttgatgattcacttgcagcaggttgtgttttcgctaacttggctttgagatcggtaatctctttgcgtttttccgtcagttctgaatcaaggctgctgatagctgactgcgtctttttgttagccttggtttggctggcaactggatcgccagctgactttactgaacgactattagttgtactgcaaccgccgagaagaagaacaacaacggccagcggcatgaaaagttgaagtaatttattttttctcatcgtaaggcctttcgataaccagctgcttgtgcatcagcttctgaattgaagtaaaccgcgttggctgaattcatgtgatagccagcttgaccaggcacatggtaaattttgctgcggctgtttccgatgatggtgccttggttacctgtatacaaatctccgcttttagcgggggcctgttgttgtggctgagtggcttgttggttagcggctgacttttgtgcctcctcggcttgtttggctgcttgtgttgcggcagctgcttgcgatgatgctgcggcggcttgttcagacgcggcaacttggctcgccgatgcctccttggaagccgcctcagaagctgctctggatgatgatgcggcagcaacactggaagccgctgcctgtgaacttgcttcagattctaagctagcttcttccttcttaagtgcctttagttcggctactttcttggcttttactgctagcagaattttgccatgcgccttttccgcgtcgaggcggctttgttgtttggcagtcagcgccttcgttttgctgactgacgacgattgatgcggtgatccggatgctgccttggtgtttgccatcggactgccgacaatcactaaaatgatgccgccaatcagcatgatcaaattcaagcgtttggtcaggggatgtttgcgctgtcgaagtagccgaatgatgccccatacggaaccaactaatccgagcaacacaaaaatatttcccagtgttgacataatgttccctccaaagtttttaataccaacattaactattctgagtagaaaaaaataatgttgatcattaccaaggtttattttcccagaaaaaaagcccggcgacaagcgccgagctagcttcacagtcagtttttttaggatttgaccacatcgacattagcatacaagtttgcaatgatcgccagcatgtctttttcagtccggtcccagccgatcgttttaagaaaggcttgaccattttggacttggttgctgatcgtgtcagggttggcacaagcatttgcaagcgttttggccagatctcgttcatcaaggtgactggcaaaataggtcccgtctttcaagaagtagcttcctgtgccttccttaaaatcaatgagtggcaggccagtgctcatcatttcataagggacaagcgaaaaattggtcatagatggcgcgatcccgaaatcagcactttggtaaagtcgatttaattccgggggagtcagcttaccaaggttttcaccattgatgaatcgtttgctgcggccggtaccgaagtattgaattttgagatcgattcctttggcgctcagtaactggcggcaattttcgaggacaatctgaatgttgatgggtgcgcgccgcgggctgctccacttggtatagacagcaagcttgatttgcttcttttgttgataaggtcccatgtcgcgttccttgaatggataccgtgcgacatcgacaggaaagttaatcacatcaataggactgtgaaccttgcaatgcatggtgatcatgtgggcacaccatggaccaagcgataccatgtgcaggcctagactgtaagttcgtcgcgccatctgatagcgatcgccatatggatagaaatacggttcgtaatcttgaacaaaatacattttgtaccccggtttgttcttgatcacataaacggattcccataacgtggcgacccaaatatcggaacgatgggactcaagttcgcccattggcagacaggttcctttgtaaccgggataattaaattcagcattctgaatcatttcgtcttggctttgtgggacatagcttaaatagtagacatcgtaaccggcgttggccagcagcgtacctagatgcagcatcgttgtttgaccgccatcaaaaccgataatgccggttgtgacaaatgtgatccgattaccacgcggtttcgtttgatcggctggttgatcattaaaatatttcaaaatctgatcatattgatgaatactgccatcaggggcatcactaaacttagtttttgcaggtttcacaacgagtcctccttgtatgattaatggtactttgtgtcgctttaggcgttgcttaaatttgagtagaaaaaagaagagcggactaattgtcatctcgcgtttggtgtgacgatccgtgtaggctcaagcagcgtacaaaagcggctactttattttagtttacataataaccgtaaacttctttttgaaagttttcaagttgtcgctgaatggtcgttaagaacggagaggcgtaaaatagaaggacaggaccagtggtatactgtgttaataatagtggcatttgactaggcaggcggatcattacgaatgcttatctttaccctgacaggggcctgtgctagtgtgaaagtaaattattttgtcatgaaagaacaggtgaaacgatgttaacgattggtgtcatgggacttggtacgattgcgcagaaagcatatctgccagtttacacacaaatgcagaatcaagtgcactgggtactgagcacccgcaacgacgataaattgcaacaattggcaacacaagacggactcgcgattgcgggcacgactttagaggatttggatgcgcaaccgctcgatgccgtcatgatccacacgccaacggaaacccattatcagtatgtgaaacattttctggaaaaaggcgtcaacgtttttgttgataaaccacttgccacagatatgggccaaatcaatgaattatatgatttagccgatacccagcacgtgctgctaacggttggattcaatcgacgatttgcgcctatgattcaggacttggctgaagtcgatgataaaaccggcgttcgcgttgacaaaaatcggattgatgcccctgacgatccagaacatgcactctgggatctctttattcatccggtagatacggccttaatgttggcaggctatccagaaaaaccaaatacccgatattcattgcataccggcgatgatggtaaactgcagcaagctagtgtgattttcaccgcaccgggcatccgcggtgaagccgggattgacttacaagcaggtaccaatcttgaagaagctcaggttgcggctccaagtggcgttcagcgtgtgcagaatcttgatcaactcgtcgtttacggacgtggcggggcaacgcagacattcgcgcctgattggcagccgatgttaacaacgcgcggttttcagccaatggttcaggcctttgttcaggctgtggcggatccagaagggaaaaacccggtgtcaccagctactagtcaattggcgcacgcagttgttgcggatttggttaatcagatcaaggcttaagttgttgtggattttgggatataaggcatctaatcattcggatgccatcaagaaaatgctcgctagtgaatttttggcatggtgagtgctgtctttttggagggaatcgcttatgtatcgaaaagaatttatggcaatggccaatgaagaagccaaggcaaacgtcaatggtagcgatggcggtccgtttggttgtgtgatcatcaaagatggtaaagttgtcagccgcgcgcataatcaagtgctggtcgatcacgacccaaccgcccatggcgagatcacggcgattcgaaaagctggccaggcacttggcacacatgacttaaccggctgtgaactctacacatctgccatgccatgtcccatgtgtctcagcgccattatctgggccaacattaagcaggtatactatggcaacacagcagacgatgctgcggcaattggctttcgcgatgccgctatctatgatttcatcaatgccggcttgaaaggcgacatgcttgctctgacccaacatgatcgcgagttgacgatcggggcattcaaagactatcaatcggctcaaaagaaactttattagcaacacgagtggcatcatctatcattagccaaaatgactgacagggaaaagcgaaaacccgcatcagttgtcaccaagtgctgtcaaaatgtatttgacattttcgcactttcctgtagaataagttaggtacgatattaagcgccactcattgcccgttggtcaaggggttaagacgccgcgttctcagcgcggaaacacgggttcgaatcccgtacgggtgagaaatagaacaaataagaacaaatgaaatcctcgaaatgcctttagaatggtgtttcgggggtttttgttttggggagaaaggactaaaagggataacttagggggcattgatcggggactttcacgaacaagtattcgtggaaaaaggcaaatccccctgaaacgtggaaactattgtgcctcaagggttttgggcggtgataaatgcattgagtttttagaagtcccctaatgatcgctgaatctagcgtccagcacggaatgtagcgaccgatgatgttttcagtcttttgaaggcatttttactactttgtcctttttttccaagatactcttgaccgattgacacccgcaactaggtgtcagcttcggcctgcatttgcgtgaagacatggccgtacatgcggtgaagttcctttaaactgctgtaaccaagacgcttcgcaatataccagtcagagtaaccagcgtagatcacacaaatttaaccttaaagttgacaaaaaaagtcactgttgatacattataaatattgaaaagaggccatcgggagggtaccccgatgacctcgacacggtctggaagactggtgtagaagctaaccctcgtggctagcttcttttagtatcttggttgcgtagttattttaaaatattggtcagcaagccactaattcatcatcgccactcctaacgtcaaataggtagcgaataaaatccaaacaaagtatggcacaaacaggtaggctgccagtttattcacattgcgaaaggcaaggatgcaggcaaggacaaccacatcaagcactataatgatgatcagtccgagccaatagctattgccgccgaaaaacacgatgctccaaatgaagtttagaagcagttgactgccaaaaagactgaaattgatggttttttgggtacgcgatgtcgtgtctttgatgactaagtaaccagcaacgccaattaataagtagaggatgatccatactggtccaaagacagcggctggtggtgaaagtggcggcagctttaaggatgtatagatgcccttgatattacctgcgagtagaccggaaagggacccaataagttcaacgacgacgatgctcaaaatgagatgaaaccagttgatatttctttttatttgcataagcaattacctccttttttgagtttagcatgctcattattaattgtgttaatatcacgcatttgataaggtgcgtcaatcattgattgtcaaaggctgttactgatccagaaactgccttgacataagttctatgataaaggtagagcctgcttgaaggctttggcaggccagaagtttgattaagcgaggcgatcatcatgatgcaatatcgattacaattagacactaaaaaccagttgtttgtagcaattgacgcacatgatcagaaccattttggaactggtcggacggttgaagaggctattaagaacttgaaggattcaacagacaacaaagctgcataaaatcaggtcgtggactttcgcacttgcgagaacccacgacctgattttttagtggcgcttattttcctaaaaggttcgtggtaaggcatcttctagtgcattcccaattcaattcgtcagacaacgccgtagcttttcgataaatggatttaagcctgcgtttccaagtagttcgattcggattactgatatcgcaccaatcgccgccgagttcggatccaaacaacgataagcacagcgactagcgcaaacacaccgactgcggcaatgatgaacaaactgcgatagctgagccagtcgatgattagcccgccgaataatggcccgagtgcgcgaccaacggaaccccaagaattgacgaaaccttggtagcggcctttgatttcacgcagagtcagatcgttaacgagtgcaggaatagcaggggatgcggtcgcttcgccagttgtcaaagcaatcattgcgatcatgaaaagcgcatatgtgtgcgcggtgatcagaatgagaaatgagatggcaaccatcacgagaccaaaaagaatttgatagataatctgaatgccgttgacgtgttcgttgaaccagtttaaaaagagttgaatgacgacgattaaagcggcattcaaggtccacaggaaactgtaattgcgtaacggaatgcctagtccagtcatgtagacggacaaattggatgaccattgttgatacatgagccaaaagatgagtaaggcaaaaaagaaagtggtcaacatcagcttgtttgcaccaggcaaactcggctttggtgtttcggtcgtcgtttcttttcgtgtcggttgcgctgtttttgccgccggtcggaacttgattagcacgatcccaaagaaaatgccatataacacaacggcaatcaaaaaaagtagggtaatgctgatatcataaacaaacccaaccaacgcagttccaaccacaacaccgacattttgcgcaaagtagagcatcgtgaagacatagcggccgtcttttgatcggatgcttgtgccgagtgaattcaccatcgtaatgttccacccggagccaatgcccagtaaggtcagccaaatgctgtaggctggccagccgtgccacaaggtcaaaccgatcaagaccaagccggtgagccccaccccaaacaaagcaaggcggtaggggtcgccttggtcgtacagacgtccgccaatgatactgccgacgacgctcccaagcgaatttagcagtaaaacgacaccgatgacagttagcgaaatgtctatgcgattatgcaaataaatgctggttaaaggccagatgaaactcatgccaatgctactaagtaaggcacctgtcagtaaccagcgtaactgaatttcgcgcaccaagggtaacgccccctttttaaaataattgcaaggcacggagccgcttgctgcctgtgtttaagacaataatgccatgttacgtcaagtgtgatcgggcggtcaaacctatttttggggatgctttcatgattgaaaataaacgcagacacattttgtgagtcagaaaaggaaaagaatagggacttggcaacatgtcccaaaaccttaatgcatagcaggcaggcgcatgcgtaaataagcgatgaaatggaagacgataccaagtagtagcaagacgccagcgatccaaacgttcagccaactgaccaaaatggaactaccataaattaagccactgattaacggatcgatacgttgtgtaggactggtgatgccatgatcggtgagttgtggatgggtgcttagataatgataaatcaaccaataagaaagcgaaattaagagagcgacaatgtcgtagacaataaacgctacctgcatgtcagcatgattcaaggttcgtaacgccattgcaaccagtgacatgctgtagttgattaacgttgcggtgaataacaggatgagattcaaaatattcagcgccgtggtggttctcttaacatgagtaaagtagtcgtggtggaaaagccacaaggtaccgacgtaaaaataagaggtgaggtaagtgattaataatggcatttgtccggttacttggtgcaacagcgtccctggtcggccagcaacgggatgaaattcaagcaccaaaatagtgattaaaatggcaaacacgccatcgctaaacgcttcgatacgagattttgacatagcgatcaatgcctccttttgattgccatttgggtgaggtatgccggatcggttgtaagaagttgtcagcaaaaaagcggccgcaagattcggaccgcttgatgttattcacttataacttaaagatttttatccatattaaacgttaacttcgacagttttaaactttccatgacatagttgttaatcaaagctttagtagcttgcttggtgtgatcaactaacttgtaattggcttcagttaaatactgcgtcaactctttatccccaagatccttggcaccgtcgtcggtggcttggatcatttcacgatagtcgcgattcagggcagttaaataatcgcgatctgcttgaataaactgggtgtaatgggcttcgactaacacatccaagaggcgatgcagccagtaagctgaatcggcatcgatatcgaatgttttcggcgttttagagtagcttggatcggtatcgttggcgttgcaataaaacggtacatacgggctgaaagtcggcatgccaatcgctagccacataatggcagcaagtccttcattgacatcacggcgtagctgtaaaatgtgtgaattttgcgtacggttcaagccgattggccggtaacggaaacgatcggcatcactaccatgaccataaggatcaaatggtgtctcgttgtaatggctaccgaggatttgggcaatgtcttcacggttgatcaggtgatcggtatgcatgatgaatggcaattcggctgattcgggatcagcttcgatttctgggttcagaattttgtgaccataccacacacgcggcgtgttgtagtgacgatccttttcattcatcgtgccgaaaatgtggcggaagttccaaccttctttgtcggtgttcaggtgatgcgcatcgacgaattcttgaataccttcactccagacaaaattgtcggtatcatcaaagtcaacttgctggatagcaacctgattagcagcaatcgcgtaggcatcatcagggatgcgctgtgcaacccaatgatggccagtcacgatttccatataccagacattatctttgtcggaaaacaacaccgagttgccagcaggagagccgtattgcttgatgagttgacccagatactcaaccccatgacgagcagattcgatgaatggcaacaccatgttgacgatcaagtcttcatcaagcccatctttaaccaacggatcaaaccccaacgcccgttcattgccgtaagtactttcggtggctgacatcgcgacattgcgttcgttgatcccgctttcctcgtaatcaccgagtttatcgttctcaacatttgggacagcattatagcgatagccgttctccggcaagtctgcttcgaaaccgttcaaaggtgatttaacgtgcagcgatttctcgcctttccagcccgcgtgcatatagaaacgttgtggtgttaggggactgaaggtgtcgtcgttacgtgcgatcatcgttgaaccatcgatgctggccttcttaccgaccagaatcgaggtgcatgcagattcaattttcattcttgcgcctcacttcttaagtattggtaatagtttacgccagaatcaggtattttgcaccttcataaaaaaagacgttgacaagtgcgcaaaaattttttaagatattactcgttgttaagttattgggtagtagcgaagtggtaacgcagtggactctgaatccataatcataggttcgatccctatctacccaagcgcgatattaaaagatgctgtgaacagacatacttgtttgttcacagcatctttttttcgtctaaatcattttaatcccggttatgagcgctgggtccaagctaaaaaggcagcgtagccaaaacaaagacagccataaagcagaaaggcgccgatgatgaaggacagccatggccaagttaaaaaagcgcgtgcgatgaaaaggaagaaagccatcagcaccgcgcgcaggccacgggtgaagacggctttgacagcattattcaaatgacacctcaatgagcaggcgccgtgccttggtcaggtggctcgtggttaaccacatattattagttgaagcctgctcagcgtcttcactcaattcaggcagcaggcttaataaccatgcacctaactcaggattattgaatgcaaaatgttctggcaaacggataacccgtaaccggtttggtgggaaaaagagtgattgttcaggaaacaacacacggtcgtctaaaagaatactggcgacattttgataaggtaccgtgcgaacctgataactttgcggatgggcatgggcatatgccagtatcatgatggctgcgttgatcacaaaaaaggcctccattcagaaatgcttacgggtttcatgataccatggaaaggagaagtgtgtgcgttaagcgagaatgcgcactggacagtcacgatgcgacaatgatgatgagatggcataggtgcacggactgaaggagtgatagacatgacgataaggctatatttggttagacatggcgaaacgcctatgaatgcggctcgacaattgcaaggcatcacagatgcggcgttgacggctaagggacgcgccgctgccgaccgattaggcgagttgctacggccagtgccttttgcaaaagtctttaccagtgatcgcggcaggacaattgaaaccgctcatcggattattgctggtcatcagccgcaaccgccattgattcaattgtccgccttacgtgaatattattttggcggcttagaaggtgattctggtaacgccgtcatcacccgcacgattcgtcaatttggggtggctgccgcttttcgggcttggcgcgggtcggagcgttttgctggactcgtgcggtcaattcgagaagcagatccgacccatcaggcagaggacttaccagatttgattgctcgtgcccaccaggcttttacccaagtgatcgcccaaagcccggataacagtgacattctagttgtttcgcacggtatgttactgagtgcgttgatttatcagctggcgccagaggacttgccgtttatgctgttgaagaataccagtgtgacgcgggttgacatcacagagaagcagtggcaggtgcgcggcgttaatttaacgcgtgaacgcgacattttggcacttcgcggctcagcaacgtcgacggcacccgatgctgcctcggatcagtcgccaaagtgatttcttgggctgaatggttatttaacagcaaccagtcatgtcccaataataagaattttgttaaaacgacaacctcagacctttgactgaatttgtcgttttttgattgcattttaaaacaaccgcgactataatgacagcttgtcacatgacaaattgtcatatccgtgaaaggaggccgtcatgccgaaaccaacgttttttcggttaccggaagcaaagcaaaaacgtctaatggatgccgctaataaagagtttgcccgcgcaccatttaatgatgctagtattagtcatattataaaggatgcagggattccgcgcggtagttattatcaatattttgatgacaaagccgatctttatttttatttattggaacaagtgcggcatcgcgcagttgctgctttgcaacaggtgatggccaaacatcacggagatctttttgccgctatgtcagaattttttgggctgacgattgatgcgctggttcaaggtccgcatgcagcactttatcgcaatgtctttttgcatatggatttccacagtgcctcaaaaatggccggatcacctttagctgagcggccccgtgggcatcatgagatacatcagtatttgctggcaaatattgatcgtcgtcagttacgaatcaaaagcgacgatgatgtcagtttgctcattcgtcagattgtcgggatgttcatgcagacaatcggctatttttattcacgccagactaaaggtaaagaggtgaccgttgctgagttgaagcaacgcaccaatcaaattctggactggttgcagtacggcgttgccagtgaaggggaacgtcattaaattgtgcaagacggtcgaccgcaattgcgatctaatgcacgtgttaggaggaaattatgcttaagcttgcaaaaaaacgcatgtctggctgggccgtcatcggcgccgtcctgttcatgatcgttcaggtgatgagcaacctgtacttaccaaacttgacagccgatattgttaacaatggggttgccaaaggcgatattgattacatttgggcaaccgggatgaaaatgatcctgtttgccttgctcagtattcttgcgagcgtgggaaatgtttttcttgcgtcgcagacatcgcaaaaactgggacaaaaattacgttccgacgtctatcgcaaggtcattaactattctcatgatgagatggacaaggtcggcacaagctctttgatcacccggacaacgaacgacgtcacccaaattcaaaacgtttggatgatgatcttgcgaatgatgatcatggcaccaatcatgctcatcggggcaagctttttggcttatcaaaagagtcataccctgaccatggttttcttgattagtctgccattattagcctttttcctattgattattatgtattttgctgtgccgttgtttaaggctatgcagaagaagaccgataacattaacttagttttccgggaaggtttgactggcgttcgggtcattcgtgccttccgtcaagatgattttgaacaaaatcggtttgaaacggttaaccaagattacacgcacaatgccgtgaaggtcttttcaatcatcgctgcggttttcccagtgatgacgttgattatgagtggcacgaacattggcattacttggtggggcggccatttgatcgcgcaacaagcacttgaaactgggaatctgattgcgttcatgacgtatgcaatgcagattttaatgagtttcatgatgctttctatgatctttgtgttcattccgcgggcgcaggcttctgcggttcgtttgaatgaagttttggatcaacatagtcggattacgacgccaacctcaccaaagtcgttagacactacccatcctgcgctgcagtttgatcacgtccaattccgttatcaccatgcggaagagccagccttgagtgatattgatgtgcaggtcactggtggtgagacgctggcgattattggcggaaccgggagtgggaaaacgacgatggtcaatctgattcctcggttctacgatgcggaaaaagggcatgttcgagttgacggcgaggacgtgaaagccgttgatttgaagaagctgcatgaagctgtggctttcgtaccgcagaaagccaatcttttcaccggaacggtgcgcgataacatgaaatatgggaatgatgaggcaaccgatgatcaaatctggcatgcccttgaaattgcccaagctaaagatttcatcgcggccaatccagaaggcctggactatcaagttgaacaaggcggcggtaatttctctggcgggcaacgtcaacggttagccattgcgcgtgctttggtcaaggatgcatctgtttatgtttttgatgattcattctctgcgctagactttaaaaccgatgctaatttgcgcgccgctttaaaggccgatgctaaaatccagacaaaagtcgttgtcattgttggtcagcgagtatcaaccgtcgccgatgcggacacgattgtcgtgttggatgaaggtaagatggtcggcaaggggacacatgctgagttgaaggccaccaacacgacttatcaggagattatcaagtcacagattcgggaaggagacgagcaataatggcagatcaaaaaaagtctgaaaccacgaagcagccgtccggccctcggatgggtccaggcggccgtgccggtctcgttgaaaagccgaagaatttctggggcacgacggcgcgtttgtttggttacatgcgcaatcggctgattgggatcattgccgtactggttttggcgattgcctcaaccgtctttcagattcgcacaccgaaaattttaggggaagccacaaccgaaatttttaaaggcgtcatgaaggggcaagctgaacaaaaagctggcatgtcagttggcacttatccagttgattttgacaagatcaaacagattatcttaatcgtcctagtcttgtatttgggcagtgcgctgttcagtttcctgcagcagttcattatgacccgaatttcgcagaacacggtttatcaactgcgaaaagatttgaagtacaagatgaaaactgtgccgattaagtattacgacacgcacagcaacggtgatatcatgtcgcgggcgattaatgatatggacaatatcgcctcaactttgcagcagagtctgacacaaatggtgacaagtgctgtgatgtttgtcgggacgatctggatgatgttgacgatctcttggaaactcacgctgattgctttggtgacgattccgcttggcctgattgtggtcgggatcgttgcgcctaagtcacaaaggttcttcgctgctcagcagaaagccttagggttgctgaataaccaagttgaagagacttatggcggccaagtcatcatcaagagtttcaaccgtgaagacgatgaagtccgcgattttgaaggtcagaaccaagccttttataatgctgcttggaaggcccagtttgtttctgggatcatcatgccgctcatgatcttcctgaacaacatcggttatgtttttgtagcaatcatgggtggtatcgaagttgccaacggtgccattacactggggaatgtgcaagctttcctgcaatacatgcaacagttctctcagccgatttcacaattggccaacttggctaacacgattcagtcaacgattgccagtgccgaacgaatctttgctgttctggacgaacaggacatgcaagacgagccgtctggtgtgccagcagtcgcaaatgatccgaacaaattagtgatggatcacgtacaatttgggtatacaccggatatgctgctgttgaaggattacaatttgcaagtgaaaccagggcaaatggtggccattgttggaccaactggggccggcaaaaccacgatcatcaacttgctggaacgtttctacgacatcagtggcggttcgattcgcttgaacgggacagacacgcgtgatatgaagcgagaggcagttcgctcgcattttgctatggtgcttcaggatacgtggctgtttaccggtaccatttgggataatttgaagtatggtcgagaagatgcgacagacgatgaagtgcttgcggctgccaaggcggcgcacgttgataactttgtccggcagttgccagatggctataacacgattctgaatgaagaggcttcaaatatttctcaagggcaacggcaattgctgacgattgcgcgtgcgtttgtcgccgatcctgagattctgattcttgatgaagcaaccagttcagttgatacccgaactgaaattcatattcagcatgccatgaaccgactgttgacgaatcgcaccagttttgttgttgcacatcgactttccacgattcgcgacgctgacaacatcatcgtgatggatcatggttcgattgttgaaaccggcaaccatgatgaactcatggccaaaaacggcttctacgctgatctgtataacagtcaatttagcggtaatgttgctatttagggctgatttgtagggacgagcgtgagccataattcccttgtaggacttgtgattcgttaaattccgaataatcgtaggcgggtgctaggctaaaagttccttgccgtgccaaacgccgcaatctccggccagatggggtggcgacgcgtagctagagcagtgacggcgctttgagctcgcaaaaagcagcgcgatctcaaagtcgcctaacaacatcagctccaaggaccgtcgctgtgttgtttccacggctgagccccatctggcctacgattgctccgccttggcactaggatttttaaatttttcctgactatctatgaaaaacaaagacgactgattttccgcaattgaaaatcagtcgtcttttgtttggcaatggtgaacgttgaaacatcttaacttttcagcgccgcttgtggcgcgtgaaggtggcgtagtgcagtaggcaggctaacagaacaaagaagattaccacgaagctgacatagcgccaccagaagttggtggcgatgccaggtaaaagcaactgaatgcccatcgtcgccagcgccatcacagcaatcatgccgaataataagaagtatcgtttcacggtttcatcatcctttttcttaaatgtgcctaatttttcgccgagttggtgggcttgattgacctttgccagtggcagtgaggccatcccccaagtatgcggtaaaaccagttcggttattttatggacacctgctgctgtcatggctttatcaatcgcaaccaaggtcgcatcggtttggtgcgtgaacgtattgtccaagcccgtggcaaaacaactggtgacactgacataatgcttgtccttgaattgcccaggcaaggtgtcacctttatgagtcattcgcgtcatgcgatggcgcatacagtccagcagttgcttaaattgaccagcgacagtgccaaaataggttggtgtacctaatacccaaacatcagcagcttttaatttggcttcgagtttatccagcgttggatttgtggtctcaggtttgtcaggatgaatttgatattgattcaaatcgacaaactcagttgtggctggcgctgcaacgccggccagcacttctttgactaagctggcggtgaggccattagcatcctgaccaccgtatatccccaaaattttcatcaaatacttgcgcctttctatgtcatgtttttacatgacgtcacacttaactctaaaaaacatttgtgaatttcgcaacttagttttgttgaagaaggcgactttcgcgatggccagcactttttgagttgatttgcgaattgaatcaccaaatcaagcgttttgttggcaaaaattgaaccgaatcattatgctgttctcagttatgtaaacagcgggggattaacgctgtttgcgtgttcaagaaggggcagattaaaatgacaggaatcatattgccagaagagacgcgagtggattttgtcgcgcttaaagtggcgaatttgacgttggtgagtcaatggtatcagcaggttgcgcggttagatctgctacggcaaaatgggtcaacgatttatttaggaacccggcttaatcaacaggttttagtggtgttgcatcaaattacagggctgcaggcacaacaaccggtgactggcttggatcattttgccattttgttaccgaatccaggtgccttaggtgcggcttatcgcattgtggctaagaatcaaacagtaacgaccgcctttcagacaggttatcgggaaggcttcattgcccatgatcctgaaggcaacggggtcgctttcaccattgatcgcgcgattgaacagtatcaagaagaacgacaatataactgggaagacgaaacgcttcagccgattgacccggcaaccattggcgaacatgcggctcgggaatatgatcgattgccatctggtacgacgattggttatgtccaatttcgggtgtccgatttaccagcgacaagtcattatcttgaacagggattgggttttcgcgaaaagactagccgtgatccaaatgaggtttttttagcggcaggggattatcggcaccacattggcattaacttaagactggatgctaagttggcgttgccgacgccggatatgtatggtttggattatgtgagttttatcttgccagatcagcacgctatggaaaacattttgatgaaccttgatgcggcaggtttaacggattacgattataataaagacaatcaatttttgatgattgctggtcctaatcgcctaacgctgtggtttcgggtggcgtgattcgtgataatggtcagtacatcagagagaaggccagcatggattttcaagcagtgacggatgaactgaagacatggacaaaagcccgggtaatgccgggttttagtgtggcattattgacgggtaaaacggtgcagacggcggttagtggcgaggcacagtggttcccgcaacctgcgcctttgcagccgcatatgctgtacgacgtggcatctttgacgaaggtgataggaactaccacggtgttcttgcaagcatgggaccaaggcttggtttcgccggatatgccgctacaccgattcttgccagatttcccacacacaaccacttttcgacaggcactcacgcatacttcaggactggaaggctatattccgcaccgtaatgccttgccagccccggcgctgaaacaggcgttgatgacgcaactgactgttaccgaagaagtggatcgtcaagtggtttatcgcgacgtgaatttgttgctggttggctgggctttggaacaggtatatcatcagccaattcaaacactcatcacgcggcaagtgatacagccgctagccttaccgcaagctacttttcaacctgattcacaacaatgcgttccaacaacgtatagtccggcagtcgggttgcggcaaggcgttgtccatgatcccaagagcgccattcttggtaagcatagcggtgcagctggcttatttgcttcgttggccgacctagtaactttcaccgaatacttttttggcaaccgccaatcagcaagctggcccgcgcatgcggttgatctcacacaggattggacaaagcatcacttaggccgaagtctcggatgggacttgcggcgcgatggtcaaggacgactatggctttatcatactggctatacgggcactttttggctgattcaacctgatgatcaattggcattggttgtcttgaccaatcgggttcacccccaaccaaatccggcttttttggcaaggcgggatgctttgatagcccgatttttaagtgatttcaaaacaatgcctgctgtataactgataaagttttgggacatgatttatagttgcaaaaaaagacgagcgattgtccgtagtatttggagtacggaaaaccgttcgtctttcattttgttatagacaatctgctgttgaatttaaagatcccagtgccaaggcggagcaatcgtaggccagagggggcccagctgtgcaaacaacacagcgactgatctagttaggcgacttcgaaaccggtttttgggctcgaagcgccgtcactgctctagctacgcgtcgccaccccatctggccggagattgcggcgtttagcacggcaaaggattctttgcctagcattccttcccacactgtcgtagaaagcatacgcggcctaaaagcctgctttgatgtacccgccatcgcttaatttcttgcgtagttgcaacattgctgtataggtggccagaacgtaaagttgatcttgcggggagcgttttaaggtgctgatgacatcatcaagagctggcttgctgacaagcgctttttcgggcacacctgcgactgtaaggcgtaaaccgatgtccttgtagcgttcgccgccgaccaaatagctggcggccttttgactggcaacgagttcttcaaaattgccgtcccaaatccaactagtatcaatgccatctgcataattggcattaagcagcattgcaaaaccaaacggctgcttggcggtttcgatcatgctgaggacctggttgaggccgactgggtttttaaccaaaatcaaggttaattttttcttgccaagttgaatgacttcttgacgaccgaagaccttctcgtcataagcaaaagcttggctgatttcagtcggggtaacaccgaacgcccggccaacagcaaaggcggcgagcgcgttgtagatgttatacatgccaccgatgtcgatgtggcatggttgatcatcaatcatgaagtcgctgctttgtggggtcatttgggtgacctcggtgatttgatgggttaaagcggggcgtttgaagccgcaatgcggacaaaaataattgcccaaattggcgtaagtttgtgcatggtagtgcagaatgtgctgacataccggacataagacaccgtccgtattcggcggggctttatgatcgccatttgccgtgagttcaaagccatagtaggtgactggattaggcagctttcgggagctgaaaatcggagcgtcgccattagcaatgaccatcgcttcaggatcgcgtgtcacaccgtctaaaattttctgataggtggtataaaattccccataacggtccatctggtcgcggaaaatattggtgagaacaaaggccttgggttttaactgagcggcaactggtgcaacattggcctcatcgacttcgagcacagcgataccgcggccatgaccgcgcttcggctgggccaaaaaagccgttgtgataccttgcaacatgttggagccagtggggttcgttaagacttctttatatttctttttaagcaccttaacaatcaggctggtggtcaacgtcttgccatttgttccagtcaccacaataacatcgtagttttgaccgagcgtccgcaagacttggggatcaattcggttggcgatctggcctggtaggctcgacccgccttttagaaatgtgtgtaagaaccagtaactgctgcgaccaatggcagttgccaggctagcttttgcagaaaatgccacggcgttcttcctctcaacttaatgggactattttagcataagttgcaagcaaaccggcgggcgtggtgttctttgcacaaaaaatccgttatactgtgagctgtgatatttgagatggaggcggcatatggcccagcttttctttcgttacggtgcgatgaactccgggaaaagtattgaaatcctgaaggttgcgcataactatgaagaacaaaataaacgcgtaattttgatgacaagtgccgtggatgatcgtgccggcgtcggtatgattgccagtcgaatcggcttagaacgcacggcaattccgattacacacgaaaccaacctttacgacatcatcaaggcaactgatcctaaggcagcctgtgtgttgatcgatgaggcgcagttcctgcagaaacatcacatttttgaagcagcacgtgtggttgatgaattacatattccagtcatggcgttcggtttgaaaaatgatttccgcaatgagctgtttgaaggttcaaaatatttattactctatgcggataaaattgaagaaatgaaaacgatctgctggttttgtgccaaaaaagcgattatgaatttacggattcatgatggccagccagtctacgaaggcaaacaagtactgattggtgggaatgagtcgtattatccagtttgccgacatcattattttcatccgccattgaagcagattgaccccaccgattaatttttaaatggcgcttgacgataagtgcccgcactggcgcgtttagcgactaggcgtgtcgattgtgacgccggtaaatgcatttttaggaggaaacatggataagatttttgaacagttggatggtctgctggaccgttatgaagaacttcaggagctgatgtcagaccctgaagtgattagcgatacaaagcgttatcttgccttgtccaaagaagaaggcggcatgcgggatgttgtcgccgcttacaagaaatataagcaagtgctttcagatattaaagaaagtgaagaagttctgcgggaaagcaaagacgacgacatggaagctttggccaaagaagacctcgaagacttgcagaagcaaaaggctgaccttgaagatcaaatcaaggtactgatgctgcccaaggatcctaacgacgataaaaatatcattatggaaattcgtggtgcagcaggtggcgacgaagccagtctttttgctggcgatttgttgaatatgtatatgcattacgctgagcgccaaggctggaagaccgagatcattgacgcaactcctactgaagtcggcgggtacaaagaggttgtggtcatgattactggggacaacgtctactccaagcttaagtatgaaaatggggcgcatcgtgtgcagcgcgttccagtgactgaaagtgctggccgcgtgcataccagcactgcaacggttggtgtgatgccagagtacgatgaagttgatctaaaaattgatccaaaagatattcggacagatgtctatcggtcatcaggcgccggtggtcagcacgtcaacaaaaccagttcggccgtgcggatgacccatattccgagtggcattgtggtctcaatgcaagatgaacgtagtcagcaggaaaaccgggcccgcgcaatgcagattctgcgttcgcgtgtttacgattattatgaaacccagaatcaggaaaaatatgatcagaatcggaagaatgcgattgggactggtgatcggtcggaacgaatcagaacttacaattacccgcaaaaccgggttactgatcatcgaattgggttaacgctcaataagttggatcgtatcatgaatggcgaactcgacgaaattatcgatgcgttgatcgttcatgatcaggcgcaaaagatggaatcgctcaatgtctaaaacgtatgccgaggcgctcaagtgggcgtctttgttgttgaccaaggacgggattgatcctgacggtgcgcggtatgtcttgatgacacgtgcggacttcaccccaagtcaattgattttgcatcgtcaagatctgatgcctgaaacacgttggcagcaatttcaacaggatgtcgaacgcttgcgtcagtttgagccggcccaatacattgtcggggtagcccctttttttggtgagttgtttaaggtcacaccagcagttttaattccgcgatttgaaactgaggagcttgtggcttgggccgctgaagagcaacggacagcacaaactggcttggatcttggtactggcagcggggcgattggcttaaccttagcccgcaagttgccgcaaacaacgatgaccttgagcgatgtttcaccagaagcacttgcggtcgctaagcaaaatgctaaggaacagcaggtggcagttcagtttacggtgagtgacttgtttgcagccctaccagcccggtatgactttgttgtgacaaatttgccttatatcgccccagaagagacgcctgtgatggatcaaagcacgctgcgttatgaacctaagttagcattatttgcagggcatcatggcctcgccgtttttgagcagtttgttgcagcgttgcctcagcacttaacagctggcggggcggcatacttagaattcggttatcgccaagagccggcattgcgcgaactttttgctaagcaactgccacaggcgcaggtgacttttcgacgcgatatggcagatcatcctcgtatggccaagctgcaattctgaaggttaaaacgcatggtgtgacccttgaaccgatctgctacaatttttctactaagtttgagctattttaaaaagaacatgatttggaggcaacatcttgtcaaaacgttatcacgaatctgatattccggaagctgcggctgcgctgaagcgtggtgagttggtggcctttcccaccgagactgtttatggtctcggggcggatgcgaccaatgtgacggccgttggtaaagtttatgctgctaaagggcgaccgtctgataatcccttaatcgtaacggttgccgacgccgatatggtcggacaatatgccacgattaccccgcttgcagcaaagctgatgcaggctttttggccggggccactgacaattattctgaatattttgccaggtcggctgtccatgaaggtgactggtggtttgcagacagctgccttccgaaatcccgataacgcgttaacacgcaaattgattgcgacagccggcgtacccattgtcggtccatcagccaatacttcgggcaagccgagtccaacaactgctgaccatgtgttgcatgatcttgacggcaaaattgccggtgtactcgatgacgggccaactcaagtcggtgttgaatcagcaatcattgatctcacggtcacgccaccagctattttgcggccgggagccattggacccgatgaacttgaaccgttaatcggacacgttgatacggcagcacatcatgttggccaaaacgaagcacctaaggctccaggaatgaaatacaagcattatgcaccagctgcgcaagtagttgttgtcgatgatccagcccaattttcggcagcggttgcttgggctaaacaaactggtcaagtgtttggcctgttggcaactgatgcaattttggctcagtatccgacgataccaagctattcacttgggaagaatgttcaaagcgctgcccacgctttatttgccgggttacggtggtttgatttacatcccgatgtcacgctggtcttagcacaagccttttcaaaaactgaattaagtgctgcttacatgaatcggctgttgaaatcggctggcgatatgcattttcaaggatagtcgcggcgaatcatagcgctaaccgtttatgagtgctggattatcgaggactcaagtttagccgtcgtgctgaatcgttatcttggatgatggcagctgtttaaacgaaacagaatgccaacattcagctacaaataagtagattttctagcagacccaagatgatttgctataatgagaccaactgacagagcctttgtgagttggttttttaataaaagcaaatgcaacgggtgttttgatggcgcattttaaaggaggaacttgcatggatttcatggcacaagatccagaagttttcggtgcaattcataacgaagaggaacgacaagaacataatattgaacttatcgcttcagaaaacattgtttccccagcggttcgggcggcacaagggtcagtgctgacgaataagtattctgaaggttatcctggccatcgttattatggtggtaatcaatacattgatgtggttgagaatctcgccattgatcgcgctaaaaaattgtttggggccgaatttgcaaatgtacagccgcattccggttcacaggcaaatatggccacgtatcgcgcctttttagaagatggcgataaagtgctggcaatggatctaaccgatggcggccatctgactcacggcagcccagttagttttagtggtcaggaatatcatttctaccattatggtttggatccgaagacagaacggctaaattacgccaagattcgtgagcaggctgaacaggtgcaaccgcgaatgattgtggcgggggcttcggcttatagccgcgagattgatttcaaaaaattccgcgaaattgccgatcatgttggggcctttttgatggtcgacatggcgcatattgccgggttggttgccgcaggtttgcatatgaatccggtgccttacgctgatgtggtcacaacaacgacgcataaaacgctgcgcggcccccgtggcggcttgatccttgctaaggcgcaatacggcaaggccattaattcagcacttttccccggtattcaaggcgggccgcttgatcacgtggttgcagcaaaagcagttgcattaggcgaagcgttgcagccatcttttaaaacatatgctcagcatattctggataacatgcaggcgatggtgagtggttttgaagaagatccgcatttgcggttgatttctggtggttctgataaccacatggtcttgattgatgtaacgggttatggcgtaaatggtcgccaagttcaagatttactggatgaagttggtatcacgactaacaaaaatcaaattccaggagagcagaatggcccgtttaaaaccagcggtatccgagtaggtacggctgccattaccactcgcggctttacagcagatgagagcaaacgagttggcgaattgatcagtgccgcgattgcccagcgtgatgatcagccagctttggaccagattcatcaagaagtgcttgcactgacagcccgtcatcctttatcatagttagggtttgcaaacaaatgattatcaaagaaaacgtgattgacttcttttgaaaccggtctatcagagggcttaggacgtgatgctcacggtagcacatggcgactaagacctttatatagcggtttctaggatgaagaatgcgtttaggaggcgccaaatgggcaaatttacagttttgaatcacccgttgattcagcataagctgaccctgattcgggacaagcatgctggaaccaaggagttccgcgaaatcgccaatgaaatcgcggaattaatggtgtatgaaatcacacgggatctgccacttgaaagtatcgaaattgagacaccgatgggtaaaactatccaaaaacagcttgctggcaagaagcttgcggttgtcccaattttgcgcgcgggtttagggatggttgatggtgttttgcggctgattccagccgcaaaagtcggtcacattggcatgtatcgcgatgagaagacccttaaaccgcatgaatactttgttaaaatgccgccggatattgaacaacgggatttgatcattgtcgatccaatgctggcaactggcggatcagctaacatggccattgaggcactcaagaagcgcggtgccacatcaatgcggctagttgtcttggtggcagcgccggagggtgttaaagccgtccaggcggccaatccagatgtcgatatctatgcggcagcgttagatgatcatttgaacgaaaatggctatattgtgccgggtcttggagatgcaggcgacagactttttgggacaaaatgacattctttggcatgtgtaaaagcacgtgcctttttcatatttcttcaaaagaattttcatagccgcaaaaatagatggtcaaaagccgcccaaagccatgaaaacactgatgaaaaagccgctatggcggcaaaagtttctgctttcagtgctttgtcttttaggtgaaatggtgttagagtaatgattgtgtttcaggggtctgccctagtaaacaacgattatcgaagtctccgcaatcgtgcatcatcattttgatgatacaaatgatatgacgtcacttcagtaaggaggtgaattctgtgaacgaacaatatccctcgatcaagctttttggcttaagctttaacctgacgaatgacatcggcgttttggtttcggcagttctggtattcttactggtattctggctgtctcgcaaccttaagatgaggccaggcggcaagcagaatgtgctggaatggatcatggactttacgaacggtatcgtcaaaggtaccatgcctggttcggagcgttatacttttaatttatttgcgtttacgctcttcttatttattttcattagtaaccaaattgggttattcattgaagtcgatatcggcaaagacacttggttccgttctgcgaccgcgtcgcctgtcatcacgatgacgttggccatgatggtactggtcctctcgcattacttcggggttgtcttcaagggtttcaaaggatatctcaaggggtatgcgtcaccggtcgcaatcctgcttccgatcaacctgcttgaagagtttacaaatttcattacactctccatgcggctgtatgggaatattttcgccggcgaagtcttagtcctgctcatcaggcaatttgctttctcgggcggggccgtcagcttcgtctccggattcttgcttgaggttctgtggcaagggttctcagtcttcattggtagtattcaagcgtacgtttttgtcacgcttgggatggtttacacatcacacaaaattgtgtccgagtaactaaattaggaggaaatttcttatgcaattcatcgctgcatcaatcgccgccggcatcgctgccttcggtgcttcaatcggtaacgggatggttatcagcaaaaccctcgaaggtatggctcgtcagccggaaatggctgggacacttcgtgggactatgttcatcggtgttggcttgattgaagccgttccgatcttgtctgtcgttgttgccttcatgttgatgagtcgttaatctggttcatcaataaagaagggagtggcaaaaaatgactttaggtgacacactcttcacactagtcacatttctggttctgatgctagccgtcgggaaagtggcctggaagccagtttcaaaaatgatggcggatcgtcagcagaaaatttccggagatctggattatgctgaaaagtcacgcaaagacgcagatgctttagtagctaaacgtcaagaagaactgcaacactcccaagccgatgccgttaagatcgtgaatcaagccaaggaaaatggcgagaaactgcggcaatcattggtcgacgctgccaacgcagaagtcaccacgatgaagaagaatgcgcaaaccgaaattgatcaagcacgtaaagatgccttggccagtgccaaaaatgatgtggcagacctaagtttgaccatcgcgcaaaaactgatcggtaaggaactcaatgcagacgatcaaaaaggtttgatcgatgactatattaaacggttaggtgatgcaaatggcagtcactaatcagatggtcgcaccccgctatgccaaagctttattggaagcggcacaagatcaaaatcaggtggagacggtccatgaagagttacaagcgctacagtctgtctttaacgacaacccaacgatcttgactatttttgataacgctcgaatcacggcagctgataaagatgccttgatgacaaccttaaccaaggatgctagcccgctggtcgctaacttgttgaagttaacccagcaatatgggcgattcggagcattaccagccatcatcagcgcgtttaaccaagcgtacgatgaggaagccgggattattgcggcgactgtgacgactgcagttgctttgtcagcagatcaagctgatgctttgcgcagtaccattgctgcgcgttttggcatgaaatcgacccaactggatcaagtcgttgatccaagcgtcatcggcggtgtgcgaattcaagcacgcggttcggttatcgatggtacggtcaagcaccgtttcgataagatgaaagctgcactgctggcagactaatgagtaagtaaaagaggtgaaccggatgagcatcaagactgaggaaatcagttctctgatcaaaaaacaacttgaaggatatcaggacgatttggcggctgaagaagtcggcactgtgacttacatcggtgatgggatcgcacgtgcgactgggctggaaaatgccatggccaacgaattgctccaatttagcaacggctcatacgggatggcgttaaaccttgaaacgaacgatgtcgggatcattatcttaggtgacttcgatgagattcgcgaaggcgaccaagtgaaacgcactggccgaatcatggaagttcctgtcggggatgccatgatcgggcgagttgtcaattctttgggtcagccggtcgacggtttaggcgcgattaagacggataaaacccgtccgatcgagtttaaggcgccaggtgttatgcaacgcaaatccgtatcagaaccgttacaaaccggtttgaaagcgattgacgcgctggtaccgattggccgtggtcagcgtgagttgatcattggtgaccggaaaaccgggaaaacatcaattgcgattgataccattttgaaccaaaaagatcaaaacatgatctgtgtgtacgttgcgattgggcaaaaggacagtacggttcgagctcaagttgaaacgttgaaaaaatatggtgcgatggattataccatcgtgctgactgctggcccatctgaacctgcaccaatgctgtatatcgcgccttatgccggtgcagcgatgggtgaagagttcatgtataacggcaagcacgtcttgatcgtgtatgatgatttgagcaaacaggcaacctcatatcgtgagctgtccttgctgctccgtcgtccgcctggtcgtgaagcctatcctggggatattttctatacccacagtcgcttgttggaacgtgctgctaaattgagtgataaactcggcggcggttctatgacggcgctgccggttattgaaactcaggcaggcgatatttccgcgtacatcccgactaacgttatttctatcacggatggtcagatcttcttacaaagcgatctgttctatgcgggtacacgtccagccattgatgctggtgcttctgtttcccgtgttggtggtgatgcgcaggtcaaggcgatgaagaaagttgccgggacattgcggttggatctggcatccttccgtgaactggaagccttcacgcaatttggttctgatttggatgcagcaacgcaagctaagttgaatcgtggtcgccgaacggttgaagtgctgaagcagcctgttcacaaaccgttaccggttgaaaagcaggttatcattctttacgcattaacccatggcttccttgatccaattccgattgaagacattactcgcttccaagatgaactgtttgatttcttcgatagcaatgcagctgatttgctcaagcagattcgtgacaccggtaatttaccggataccgataaacttgatgcacaaatcaaggcttttgccggcggattccaaacgagtaaacaacttgctgcagcgaaagactaaggaggtgccgcatggctgaatcattaatggacattaagcgcaagatcgcatcgaccaagaaaaccggtcagatcacgcaagccatgcagatggtttctggggccaagttaagtcagatcgaaaagcgggcaaaaaagtatcagatttattctgataaggttcgccagattgtgacccatttggctgctgggcagcttcttgagttagccaacgctgcagaaagtgataccgattcgggcgacaagagtcaggtcatctccgttgctagcctgcttcagaagcggccggtgaagaaaaccggctatctcgtgatcacaagtgatcgcgggctggttggcagttacaacagcacggttttaaaagccatgatgcagatgatcaaagatgaccatgaaagtcctgatgattacgtcatgatggccatcggtggtgtcggtgctgatttcttcaaagcacgcggcctgaatctggcttatgaatatcgcggtgtttctgacattccgacttttaatgaagttcgggaaatcgtaaaaacagctgtgacgatgtttgacaatggtgtgtttgatgaactttacgtttgttacaaccatcacgtcaacactttgacctctgctttccgtgcagagaaaatgttgccgatcagtgatttggatgtcagtgaagtggccgataccaatgttgagtatctgattgaaccagatcttgactcggttttggaatcagttttgccgcaatatgcggaaagtctgattttcggcgcgattatggatgccaaaacggctgaacatgccgcttcgaccactgctatgcgtagcgcaactgataatgccaatgacctgatctcacatctgtcgacccaatataaccgggcccgacaagctgcgatcaccactgagatcactgagatcgtcggtggtgcggcagcactagaataatcacgcgctcgctggtgcagaaacctgcgtgtaaggaccctgaacgcaatgaccaaagtgcggtcatcacgttcaggcccacttacactccggtttctaaacgcaccagctcgcgcttcatcataacgcgctcgctggtgcagaaacctgcgtgtaaggaccctgaacgcaatgaccaaagtgcggtcatcacgttcaggcccacttacactccggtttctaaacgcaccagctcgcgctcaatttacaacaggaggacgaaaatgccaaattcaactggtaaaatcgcgcaagtgatcggtcctgttgtcgacgtagccttcccaatcaatggcgatctgccagaaatcaataacgccttgaccgttgccaagaaggatggctcccagcttgtgctggaagttgccttggaacttggtgatggcgtgatgcggactattgcgatggattccaccgatggtctgcaacgcaacatggcggttcaagatactggcggtccgatctcagtccctgtcggaaaagacacactgggtcgggtgttcaatgtgttgggcgaccccatcgatggcggtgaagcctttggaccggatcatcggcgcgacagcatccatcgtgatgcgccaaaattcgaagatttgaataccagttcagaaatcttggaaactggcatcaaagtcatcgatttgctcgaaccttacctgcgtggtgggaaggtcggactcttcggcggtgctggtgtcggcaaaaccgttttgattcaggaactgattcataatattgccgaggaacacggcggcatctccgttttcactggggtcggcgaacgaacccgtgaagggaacgacctttacttcgaaatgaaggaaagtggcgttctggagaatacagccatggtctttggtcagatgaacgagccgcctggtgcccggatgcgggttgccttgaccggattgacgatcgcggaatacttccgtgatgttgaaggtcaggatgtcctgctgtttatcgacaacattttccggttcactcaggccggttccgaagtttctgctttacttggccggattccatcagctgttggttatcagccaacgctggcaacagaaatgggtcagttgcaggaacggattacatcgactaaaaaaggttcagttacatcgattcaggcaatttatgtgcctgctgatgactacactgaccctgcgccggcaacgacttttgcgcatttggatgcaacgaccaacttggaacggcgtctgactgagcaagggatttatcccgccgttgatccgctggaatcatcttctagtgcattgacgccggaaattgtcggtgatgaacattataaagtcgctaccgaagtgcaacaagttttgcagcggtatcgtgagttacaagatatcatctctattttggggatggatgaattgtctgacgaagaaaaggtcgttgtggcccgtgctcgccggattcagttcttcttgtcacaaaactttaacgttgcggaacggttcactggccagccaggttcatatgtgccggttgaagaaacggttaaaggctttaaagctatcttggatggcaaatacgacgattaccctgaagatgccttccgttcggtcggtcgcatcgaagaagttgtcgaaaaggctaagaagatgggctttgctcctgacgatcagaatacggatgctgacgaaaagccggctgcacaagctgcagctaactaaggaggcgacgcgttttggctgaaacgagcaacgttcttcgggtcaacatcgtgacgcctgatgggttagtatacgatcatcacgccaggatgctagttgttcattctgtcgcaggcgaattgggtattatggctaatcacgaaccaattgtgacaccacttgagatcggtgaggttgacgtgcaacgtgttgacgccagtgatcacaacgattcaattgcggttaacggcggttttatggaagtatcagaaaatgttgcttccatcgtcgccgattctgccgagcgtgagcgtgatattgatctcagtcgtgcgcaagctgcgcgcgatcgtgctcaaaagcgcattgctcaagcaaagaatgatcataatcaagacgatcttcggcgggcacaagtcgcactgcgacgggccatcaaccgaattaacgtcaagaccagtcattaaacatgaaaagcagttctctcccaacttggagaggactgctttttgcttgctgcttgatgaaagttagcaaaacctgcaatcaaggccacttatgctccggtttctaaccgcgcctgttcacgctctgcttgcgtcttatcgtgttctgcgggaagatacctcatgaggtgatcatatgtttcagacaatcggtttaaacggcgcgattacaatcgtgtcgcattttgttttcatcatgctcgcgttccgtgcactcaatgccttgcgctttgaacagttcatcaaagccaaccatgttcgtgaggcacaggtcttgttactcttcattgcggttgcgctaggattcttagtcagttcgttctttctatcactcttacaagcagctttaaacttacctaaacttttcctgtaaaaacctcgtcttaactatggtataatgcgatagttagtcaatttacgaggagagatatatacccatggcaaaagatattgggatcgacttagggacggccaatgtgctgatcaatgtaaaaggcaaaggcatcgtcttaaatgagccctccgttgtcgccattgatacccataccggcaaagtgctggcggtggggacagaagcctataaaatggttggacggacaccgggtaatattcggtcgatccggccgttaaaggatggcgtcatcgctgactttgacattaccgaagcaatgcttgaatattttatcaataaactaaatgtaaaaggtgttttttcaaagcctaatattctgatttgtgcaccaaccaatattacggatattgaacagaaagcgattattcaggcagctgaaaagtctggcggccgccatgtttacttggagttcgagccaaaagtagcggctgttggagcgggattggatattttccaaccacaaggcaatatggttattgatattggcggtgggacgagtgatattgctgtcttatccttaggcgaaatcgtcacgagtcgttcactgcgcttggcaggtgacaaaatggatgcctccattgctgcctacgtgaagaacaagcataagttaattattggtgagcataccgcggaacagatcaaaatcaagattggtgccgtttacgaagccgatgagaaagaaacgattgaagtccgtggccgtgatattgcgactggtttgccacgcgaagtttcggtgacatctgttgaagttgctgaagctttacatgagacgatgatggcgatcattgaaggcgcaaaaggtgtgcttgaaaagaccccaccggaattgtctgcggatatcattgatcgtgggattatgctgacaggcggcggcgccttgcttaaaggtatttcacaactttttgctgcagagttgaaagtgccagtgttgttggcggacgatcctttagatgcagttgcacttgggaccggtgttttactcgataatattgaacaccatcgccagtactaggagcgagctatggactcacaatatcctaaacgcatcttccacatcattaaaatttggctgatgatagccttaatcgcactgatattgggcttattgattggctttgctcttggggaaggtaatccgcttaagttgttcctaccatcaacatgggtgcacttctttaagtttctgcgttaggagtgtttcatgaaacaggttctgacatggttagtgcggggctaccagcgcttcatttccccgttgctgccgccgagctgccgatattatccgacatgttcaacctacatgattcaggcgttgcagaaacatggcgccatcaaaggttccttaatgggaattgcccggattttacggtgcaacccctttgttaaaggcgggcttgatccagtgccagcttttttcactttgcggcgtaatccgcatcccgaaaatgacttggatcttagtgacattcaaaatctcaatcataagctaggaggccgtcatggctaaggaaagaaatatcaaggtcacacaggcagatgaaactcgaaatggtcatacagtttcggttttaaaaatcggtgaccgggagattggctttattgaaccggacggcacgcggttttcagcatttgtagccggctcgactaagcctaaccggttcaaaacactggatgccgcagttaatgcgttgattgccgaataccatttacatcaaggctgaaacaactctggcagcgcgcatcgcaacatccagtgcaccgtgattttagaggtaaatcggtatttgaacggttttatcatcaacattcagctagtaaagaatatgcttttgcgaaaatcgaaggcattttaagaacgaaacgtgaaccaacgcgtttaggcaagagcgtgaactggcacgttcagaaaccgggacataggcgaccttgagacgacctgttgggttttgaccctttagtttcaaggctgttatgtgcacgtttctgcgtcagtgaacgtgtttaaaggagggcagcccgtggagtcacacgaaatcaaatcaaactcagagggtgatcggattgattatggcatcatcctgtcagtcatgttactggctttgatcgggcttgtgtccatctatctggccaccgctcatgatacttctacgctacagaatcctgttcgtgccacggttatgcaggcggcgtggtatgtgattggcggtatcggcatttttttcgttatgcgatttgatgcggagcagctttggcgcattgccccttatttatacgggattggcatttttctgatgattgcggtattgattttttatgaccgcaacacagaagccagtacaggtgcgaaaagctggtttgcccttggcccgatcagttttcagccgtcagaagtgatgaaacctgcctatattttgatgttgagtcgcgttgtgacccaacacaatgctgctttttcacataccattcaacacgattggcagttaattggccggatggttttgtggacattaccgatagcagtcctcatgaaatttcaaaatgactttgggacgacacttgtttttctggcgattttcgctggtgtcaccttggttgccgggattaattggcgcattctcgtgccgattgcacttgtggctggcattatcgggacagttggcattctgttagtgacgcagacatggggtcgatctattcttggtagtatcggctttaaaacatatcaatttgcccgaattgattcgtggttaaacccttctggtagtacaactggcgacagttatcagttgtggcaatcgatgaaggctatcggttctggtcaactgactgggaaagggccgatgcacattgcagtgcctgtcccagtccgagaatcggatatgatcttttccgtgattggcgaggctttcggttttgtaggtgctgcggttttgattctgttatactttatgttgatctaccaaatgattagggtcacgtttgacacaaaaaatgagttttatgcttacatctcgactggtgtcatcatgatgatcctattccatgtatttgaaaacatcggcatgaacatcgggttactaccattgacggggattccgctaccatttatttcacaaggtggttcattcttgttggctaatatgttatcagtcgggatggtcttgtcgatgcgctaccatcatacgagctacatgtttagtcgcgacacagaagattttgaataggggagagcaaaatggcaacaacttatttttggcaagatgaactggctgccgggcaaattcgtctcggcttgacccaagaggctcaagaaacgttaggcaaaatcaagtatgttgatttgccaacaattggcgcgagccttaccaccggcaaaccttttttaagtgttgaagccgaaaaagccgtgttagatcttgaggcaccgttagcaggaacaattgtggacgtgcatcaggaattgagtgataaaccagctttgttagacgaaaccgatcataaccaaaactgggttgtgacagtttcaaccaaatagctaatcaaaaagccgacccgcatttttaaaatgacggtcggctttttgcatggcacattgtgatttagcgcggcttattcgaagaagcgcttggcaatttcttgataaattttgatcgccgttgtgtaactgttcaggtcgatgtgttcattcacttgatgactgaagtggttatcaccggggccatagacaatcacatcaaaatggttagttgatttgatgaactcggaagcatcggttcctccaaacgcaacggctaattcagctggtttaccagttaccgacgcgatggcagcatttgccgaagttaccgagtggcctgttttatcggagtgaaccggcagaaaacggtgcaatactttcaacgtgagtttcgcattggtcgtggcgttgacatgtgccactaagtcttcaagcattttcacaaccagctcaatattggccgatggggtcgggcgaagattgccacgaaggaaagcgtgggctggaatggtgttgacttggtcgccgccattgatgaccgtgattgaatgtcgaaatgggccgagatccgggtcagcaggcgccttgtcaaaggcgtggtgttccagtgcggcaaaagttgttagaccatcgatggcattgacgcctttttcaggcctagaactatggacagagacgccttcactgtcaatctcgtaattcacggtgccagcatgtgcgtattttaagattttagtggtgggttcaccaacaactaagccagcgagatcatcggcatagccttgctctgtcagcaaacgtgcgcccatcgcaccgtattcttcgcctaccgttgcaatcaagcgaatcggatgagtgaacccggattgtttgagggcgatcagggccagcaccatggcggctaaaccgcttttcatatcatcggtgccacgaccatacatcacattgtcgacgactttgccggaaaaaggcggatacgtccaggctgactcgtctccaggactcacaacatcttcgtggccagtgaaaccgagaacgcgatcaccatggtttaattcggcaattaaattcacgcggtcttctgtgtaggggatcagcttggtaggaatatcggcagcctcaagttcggcttgcagcaatttggcgacggcgagctcgttgccatttacagaattgatttgaatcagcttttggagcagggcaattggttctgtcatgattgcaccatcctttgtcgcgacagtcagctgttgcagactttgtgcgcgagttttgttgagcacagcttacactctttttgatttaaaattcaatgattgacaagttaaaaaattgtgataagctcacttgtacaaacttgaaattgattgtaaacggactgagtgagtagttaccgcgaggcagtacagaaaacctgatgagctgagagcagggtcgctagcggaaatgaagatggcttggcacacacggcacaccgagcaaattgcgaggctgtgatggttggcacccattatcgtgcacccggatgaattcgtccgctgagtggatcacgttttgtgtggtcaattagaatggtaccgtgggccagagctcacttctaacaaagattgataatttgttagaagtgagttttttttcggtctttttgtatcaatggcaagtttatgcgcctcggactgcaggccgacgcacatattttagagagcgcgagtcagctcggtaagaaaccgaagcatcaataggcggggacgtgatagccgtattttggccactaggaaacttatgcgtagattgatgggttggcgaacgtatttaggaggagaagacatgaaacggttttggaaaattttgacaaccatttttgttttaggattagtcttggttgggtgcggtaaaagtagcagcagttcgtccagtagtcaaaagcaaacgacggtgaagatcggggtcgttggcgcggataatcgcgtcttgcaagcagttgctaaaaaggttaaaaaagagggcattacgatcaagatcgtacagttctcggattacaatcagcctaacaccgccttgcgcgatcatgatattgatttgaacctgtttcagcatcagtatttcctgaataactggaacaaaacccacaaggctgatctagtcagcatcgggcagaccatcattgcaccactagcgatctattccaaaaaaatcactaaaattagccagatcaagaaaggtgacaccatcgcacttcctaacgatccgactaacgaaggccgcgcattacagttacttgaaactgctggtttaatcaaactgaacaaaaaggttgccttgccaaccacgcgagacgtgaccgaaaacaaattggatcttcagttgaaggccgttgatgctgcccagacagcaagttccttacctgacgtggctgtttccgtcgtcaactctggcgttgcacacgatgccaaactggatcccaagaaggctgtttatactgaaaaagtcgacaagcaaagccaaccatggattaacgttttcgtcgcaaacaagaaagataaaaataatgctacttacaagaagatcgtcaaagcataccgaacaaaagacatcgctgacttgattgagaaactttatcatggcagtgaagtcccagcttggacgcagaaattttaatggtgagttgagaaagttggtatataagtaagcaatgttgagggtaatccgagttgaattctaggatagaaagcagagagttggcggagcggagagggggctcagccgtgaaattgttgttggcggtttaccgcttacaacaaggccagactttgaaatcgcgcgggctttgcgtgagttcaaagctgtgcccacagctctagcttcgcggtcgccagccctcctcgccgcgtagccagctcggactacgggagatgctttactggaataaaactgaagaaaaagtatcagtcgcattgcgaaaacgcgttcgcagccgcagaaacctgcacataaggacctcaagcctaaatggccaaggcccagccatttaggcttgaggccacttatgctccggtttctgaacgcggctgctcacgctctgatttaaacgcgttcaccagcccagaaacctgcgtataaggaccacaagtgcaatggccaaagccccggccatcacacttgtggccacttatactccggtttctaaccgggctggttcacgctctgagtactttatcttgacattttacctaatcatcgtctaaaatcgatttaattcatttcgggaaacgaatgacgtgagtgagtagatctaatcagactgtacagaaaacctgggtagctgagagcagggtagttaattggatcgaagatggctcattgatcggcatcgctgagcagtggttaagcgatgatggctggcggcctttaatccgcacacaggtgattgcctgttattgaggacgcgatggcgtcgaattagaatggtaccgcgagctaggctcgcttctaaaacttgtttttagaggcgagcctttttgaatgctttcatcgcttgcacacatcatttgtttacctgaacgaggaggagaaagttcatgaaattttggaaaaaggcaattttgacgtttgcactgattttaccagtatttgttttagcagcttgtggcaagtcggctagttcaacgaagaataccacggttaaagttggcatcatgagcacggataaagaaatttggactgatattcaatcacgtttgaagaagcagggtgtgacaatcaaacttgttcagttcactgactataatcagcctaaccaagcactggaagatggcgatattcaactcaacgccttccagcatcacaatttcttggataactggaacaagaaacacaacaccaagattgttgatatcggcgcaacttacatcggcccgatgcgcgcttactccaacaagatcaaatcgttgaaggacgttaagaacggcgatcagatctcggtaccaaacgatccttccaatgaaggccgtgctttacagttgttggcacaaaatggcttgctgacgttgaaaaagggtgtagcttcaccgactattcgcgatatcactgaaaataagctgaatctgaagtttactgaattggatgccgctcaaacagcccgttctttgaatgatgtcgcagttgctgttgtcaacaatgatattgctgctgccgctaatctgaagccagctaacgcaatcgcagttgaaaagattactaaggcgtccaagccttgggtgaacttcattgctgccaagtcagccaaggacaaggacaatgcgacctataagaagatcgtgaaagcctatcagacacagcggacagctgatcttttgaaaaaagtttacaaaggttcaaccttgccggcttggaactataagttttagttagaaacggggacaatcatgtcagatcaagcagttgtgactttaaaagatgtggacgttgagttccacggcaaaactcgctcggtgcatgccgttgatcatgtggacttaacggtcaatcgcggtgatatttacggcattgtcggatactctggtgccggcaaatccacacttgttcggaccatcaacttgctgcagcgcccaactggcggcagcgtcaacgtcctaggccaggatatgttggccttgtcgccggcgcagctgcgcaaggaacgcaaacgtatcggcatgatttttcagcattttaatctgatgaacagtcgaactattgctgacaatgttgcttttccattaaaaggactcaaatcgaagcaagcgatccaaaagaaagttgcggagttgctcgatctggttggactcactgaccgtgctaattcctatcctgctcaattatcaggtggacaaaagcaacgcgtcgggattgcccgcgcgctggcgtcagatcctgaaattctcatttcggatgaagcaacgagtgcacttgatccaaagacgaccagttctattctggagttgctccagtcgctgaatcaacgactgggactgaccattgtactgattacccaccagatggaagctgtgaagcagatctgtaatcgtgtggcggtcatggatgatggggcaatcattgaacgcggtgacttgttgcaggtcttttccaatcctcagcaacagttaaccaaagacttcattgatactactttgcaactggatcaggcgattgatgctgtcatgcagcagccgaccgtgaaaaatctggggccggatgatcgtcttttacgattaacctacgtcggtgattcagccgatcaaccgctggtggctaagctatttagtagctatcatgtcacggcgaacattctgtttggtgacattcagattttacaggatacgccgtttggcaacttaattgtggttctttccggtgaccatgatgaagttgaatccggaatcgcgtatttgaaacagcaggatgtcaagattgaagacattcttaagaaggaggcctagacagatgggacagttctttacaaaatattttcctaacgtggtgcctatctggtcgggtgacggcggggtgactcaggcaatcaacgaaacgttgtatatgactgtgttgacagcagttgttgccggcattctcgggattgttattggaattctgctggttctaaccgatgaagatggtttactagccaaccaaccgttttattttatcctcgataaactggttaacatttttcgggcggtgccattcatcatcttgctggcaatcatgacccctgtgacgcgagccattgtcgggacggggatcggaccaactgcagccttggttcctttaattgcagggaccacaccgttttatgcacggcaggttcaaaatgccttattgacagttgatcctggcgtcatcgaggcagctgaagcaatgggtgtttcgccgcttggcattgtgttgcgggtttacctgcgcgaaggtttgtcagaactcatccgagtttcagtcctgacgatcatctctgtcatcggcttaaccgctatggcaggtgcagttgggggcggcggccttgggaatctggcgatcgcggtcggttaccaacgttaccaatacgacgtcatcatcgtttccttaatctttattctggcgatcgttttcttggtacaatttatcggtgacttcttcgcacgaaaaacccatcattaaatttaaaactcgttttgtaagcagaactcgtgatagcgttctgcttttttttgaacgcgtttgccgctgttctttttatgacgtagaatggcgatataactaaaagtcaaattccagtcgggggtatcattgtgcacacacttgagattaaggatttacatgtcaaaattaaagcagaacctgagcatccggagattttgaccggcgttaatttaaagttagcgactggtgagattcatgccattatgggtccgaacgggacaggaaaatcaacattagccgagacgatcatgggcaatcctgcttatgaagtgactcaaggcgatgtcttaattgatggtcagtctattttagacatggcagttgatgaacgcgcgcgagccgggctttttctagggatgcagtacccgcaagaaattgctggtgttaccaatgccgagtttattcgggcggcgatcaatgcacgccggccagaagatgatcagattcgcatcaccgactttttaaagcaattggacgacacaatggcgaccctcgaaatgccggaatccatggcggatcgatatttgaaccaaggcttttccggtggtgaaaagaaacgcaatgaaattctacagttgatgatgattcacccgcactttggtttgttggatgaaattgattccggcttggatattgatgcactgcggattgttgccaaaggcgtcaacttattgcgtggaccagattttggcagcatgattattacgcattatcaacggctattggattacatcattcccgatgttgtgcatgtgatgaaaggtggccgaattattgaaagtggcggcccagaacttgctaaagaattggagaagactggctacgaacaccttaaagtaggtgatcaaaatggctgaagcagtgactttaccggcacctaacttgcccaagtttcctttagctcggtatttaaaacttcagcctgatgccgtcctagaccgtgtgattctacacgcaccgcaatcggttgcctatgcagcaggctccagtgaggttcaacggttcaccccagtcacgtcattggatgcttggttacttgcacacccccaaggcgcgaccacgattgatattccggcccattttgtaagcggtgatgagccgattgtcttgactggtcctaagcaagcgggtggactgctttatgttcatgtcggcaaaggcgctaaagtcacgattcaggaaaaatgggcgagcggcggcaatgttttaggcgtttggcttgtgttggttattgatgccgatgccgaagtcagctggctgagttatgacagttttacagctgagaccgtgattgcaaaccgtaccgccacgcttggtgccaatgctaaattgaattggaccttggcagggttttcgcgaaactccggcctcaaccgggtggatgtccgcttattgggccaaaatgccgaggcaaccgtcaacgtgggtgtgcttgcggcaggaagtcaacatgtcagttacacgacctcggtaaccaatgaagcgcaacacacagtagggcatattaaccaacgtggcgtcattactggcagtgcccatttattattcaatgggattggtcacatcatcaaaggtgcacgtggcagtgatgcccaacaagaaaatcgagtcttgatgttgtcgccacatgcggaaggtgatgccaatccgattctgttaattgacgaaaatgacgtcaccgcaggacatgcggcttcagtgacgcgtgtgaatgctgatcagctatactatctcatgagccgtggtttatctgcgacattagcgaaacggttggtcattcgcggtttccttgaaggcggcttggctgaaattgatgatgtccgactgaagaaagaactcttcgcaacgattgatcgaacgctggtggctgaagatgcgtgaacaatttccattttttaaagctcatcccgagctggtctatctagatacggcggcgacttctcagaaaccgcaagctttactagatgctattcaaaattactatgtcaatgataatgccaatgttcatcgtggcttgtataaattggcttatgacaccaccgaggcttatgaaaacgtacgccaacaagtggccggctttttaggtgcggcgagtgctgacgagattatttttacccgcgggaccactgatagcttgaacttggttgctagtgcttatgggccgcaagtcgtcgcggctgggtcacaaattgttgtgacgggtgcagagcatcacagtaatttcattccttggcagcaattagccaagcgccagcaggctacgttcacagtgacgccggtaaagccggatggcacggtggatattgctgccttattagcggccatcacgcctcagacgaaggtggttgcggtggcgcaagtgacgaatgttgcaggtgatacgttaccgattgccaaaattgcggccaaagcccatgcagttggtgctgttgtcgttgttgatggcgcgcaggcggtagcccatctggcagttgatgttcaagctatgggggcggatttctatgcattttctgggcataaaatttatggcccaactggcattggcgccctctatggccgcgctgatttattgcagcacatgccgccgattcagtttggcggtgaaatgatttcagaagtccgcgatgatgtcagtacttgggcagacggcccaattaagtatgaggctggcacgccgcacattgctggcgtgatcggattaggcgctgctttaacgtggtttaatcagtctgtgaatgcagcagcatttgacaacgaacatcaattggcagatcagttacgcgctggcttggcagcgattccagatgtgaccgtgtatggtaatcaagcaagtttggcgactgtgtcgtttaacttaactgggattcacccgcatgatcttgcgactttcttagatgagcagcaaattgcggttcgtgcggggcatcattgtgcacaaccgctgatggcgcgactaggggtgccagctacggttcgtgctagtttcggcgtttacaacaatgctgacgatgttgaacgattgattcaggcagttcaggcggcaaggaggtatttccatggcattgactaagctggaccagatgtatcgggcggtcattttggatgaagcacaacacccgcgacatcacggggttttgccagcttttgaccatgaaattacggttcgcaatccaagttgcggtgatgtcttgcatcttcaaatcaaagaggatgccggccgggtaacagacgtggccttctctggcagtggctgtacgatttctcaagccagtgctagcctgatgacggaacagatcattggcaaaacgccagcagacattgaacaaatggtcgaaacgttttctgatttgatcattaacggggatgtgccaaacgctgatattttaggcgatgcagcggttttaaaaggcgtccaccaatttcctgcacggatcaaatgtgccactttggcatggaaagcagcggcgcaagtcttgacgcagaaaggtgaagaccatgactgagacaaaaaacactaaaaacaatgaaactgtcgcggcagatatcgactttttgccagaagacaatccagcagattttaaggatgatatcaagccggtgtattctacaggtcggggcttaaccgaggaaacggttcgcgctatttctgcggagaagcatgagcctgactggatgctcgattatcggctgcgtgcttatgcaacgtacaaaaggctggcaatgccgaattttggtccagatctttccgatcttgacttggacaacatgctttattttcaaaaggcgacggatcgaacctatcgcgactgggatgacgtgcctgacgccattaaaaatacgtttgatcggttaggcgttccgcaggctgaacgtaaatatttggccggcgccagcgcccaatacgagtctgaagtggtttaccataacatgcgggatgaattcgaaaaactcggcattatttttatggacatggactcagctttgaaagagtatccagagctcgtgcatgattattttggcaagctggttaaacctagcgacaataaatttgctgctttgaatggtgctgtgtggtctggcggcagttttatctatgtgcctaaaggcgtgcagacagatgtgccaattcaaagttacttccgaattaatgccgagaacaccggtcaattcgagcggacgctgatcatcgttgagcctggcgcgcatgttaactacgtggaaggatgtacggctcccaactattccagcgacagtttgcacgcggcggttgttgaagttttcgtcaaaaatgacgcttactgccgctatacgacgattcagaactggagcaagaatgtcttctcacttgaaaccaaacgcgcacaggcactcgacaacgccactatggagtgggttgacggcaaccttggcagcaaaactacgatgaagtatcctagcgtgtatcttgacggtaaaggcgctcgcggtacgatgttaagtatcgcggtcgcaggtgaaggcgttgatcaggataatggcgcacgaatgattcataatgcgccaaacaccagcagttcgattgtctccaagtcgattgccaaagatggcggcgcggttgattatcgcggcacagttcgcttcactaaaaaggcagacaatgccttttgccacgtagaatgtgacacgatcttgatggatgaaaaaagttcaagtgatacaattccttataatgaaatccataatgccacagtgtcaatggaacatgaagcgaaggtatcaaaggtttccgaagaacagttgtactacttgatgagccgcggtatttctgaagccaaggccactgaaatgattatcatgggctttgttgagccatttactaaagaactgccgatggaatatgcggttgaattgaatcgtctgattggtatggaaatggatgggtctgtaggctgaaatcgagttcttattttaatgtcgatttttgaagaaaagctggctaaattgtcatctgcaatctggaggttgcggatagacgtttagccagctttttttattcgacataaaaatattaggcaagcctaactttttgctttatgatagaagcggcaacaaaaccacactaatttaggaggccgcaaatggataactatgataaagcaagaaaggttttgcaatcaacggcattgtcaaaaatagctcagcagaccggtatcagtatcgggcagatttggcattatcgtgatcgtcacgaaggcattgaaaaggcaccagaggcctatgtaaagaagattgccagtttgtatcgaaataagcggtattgaaatcgctagaataaggggcttgttaatttggccaaattgcaagaagcgtcaggataaaagctatgaacccccaaaacaagtcgtgatcctgatagcgatcacacgtcatgggtgctacaattaaattactgatttgcaaactgaatctcaattttttgcatgctattgcgtgtgccatgatcgcgaggaggggtaccatggctgaggatcttgaacattttatcaagacaatggcgctggggattccaacgattaaaccagacgaaaagcgagcttttctcggtaattttcgtgagcgagttgcgatggccattacgattaagcagttacgcgatgcacgaatcaccaccatgcttgatgcggtgttgactcgttatcctggttatcgaatttttcttaatggccgaatgggcgaaagtctggtcaatcaatacatgatgcaggccctagcccacaactatcctttcaccattatgaatcaaccggggatgcgcgtgactaagcgcgttttgcaaaccgattttggctgggtattggcgcacccgactcagaaaatagcccgacccatccttttataagttggcgacgcacgccggttgtgaagccgtttgccagttgaacattgcaaaaagtgcggttagtttctgacgacaatcacgtatttacaggaggtccattttgacgcaacttgatacgattcagcgaacggtacaacaactacgcgatttgctgaataaaggcgaaatttttacagcattaccgaatatgttgggcaaagtgattgagagcgtggcagttgaacctgctaccccgattaaaatacctagagacgacaagacggccattgtcaaaatcagagctatccagaagcggatcaagcaaacaagtgatcccagcgtgactgatgatgagattgactttttggtagcacatttggcaagtaccaaccctgcagttcgggataaaggcgttttcttcctgttcaatgatttgtttcaggcggaggccttcaccaatgagcaaattaaaacgcttttcaagcggctgcaagcaccggatattttgttcaatcatatttttgaaccgcaaaacaatggtatctttttgcgcagtttttcgctgatgattctaagcggcatgatctatgctgatcagaatcgttaccacgtgttgactaaagccgattatttggcgactgttcaaaatatcgccgtttatattctgttagaaaaagatggccgtggttatgttgagaagaagggctgggcacatgcctatacacatattggcaacatgctggaagaattgagtcaagttggggtcttaccgcgagctgagaaagttttgctcatggccgcagttgtggaagcttggcggcgcgttgaaacaccgcttgtttttggggaagatcatcgcatggctttgtatctgagcagcctgaccaacgtcaataagttttacagtgaaactttattgatgtgtctcaagaattggcagcacgccttggtgaatgttcgtccgcaagaatcctacagtttttgggttcggtggtacaaccgcaatcgattgttgcaagcattggccctgcgagctgatttgccacagccaattgccgattatattcagcaaattgtggatcttttttagtccatatggtcaatagaagggagcacggctttgattaaggctattatttttgatatggatggcgtgattgtcgaccctagattgcaataataaagttaccacctagaaagaggcttgctcactgcttgaactggggtttgccaacggagacattttctaggtttgttattgataagcgctgtggcttgttgaatatcggtctctgaaacctgatcaaactgtgttcccttcgggaaatagtagcgaagttctcgattgaaccgttcatttgtgccccgttcattcgggtgataggcgtggcaaaagtaaaccggtatccgatagcgctttgtaagcgcctgatcgcaggaaaactctttaccgtgatcaaccgtcactgatcgaaccggacccggaaagtccaccatcagtcttgcaaatcccttgagaacagcattttgtgataagttttcaagcttagttgtcgccattaaacgtgtcacccgatcgacaatggtcaaaacagcagcctttgacccgcgaccaccgcgaactgtatccatctctaaatgtcctttttcggttcgccgattagctgactcactgcgaatctcaattgaggtgcctactgcttggttatagcgcgaccgaaggtcttgtcttcttttatgacgtttaccgtgatcaaagagttggcttggctgaaaatcgacttgtctttgataaatccagtggtaaatcgtgtgtggcgcacagtgaacggcataaccgaccatttcaggggaccaacctaggtttagcttctcagttaccatccgcttcaacttaggcgttaaaatcgagtgccgaccacaacgatgccgacaagtatcggcatgatcctgagctataatggcgcagtaatcaccttcagggcaacggtgaagctcatgcctaatagaaatacgagagcggcctaaggtcgcggcgatgtattgaatcgtgtggtgttgcatcagttctatctgagatcgttcaattaaggttataatggccatgggacctgtccttctctctagatggtatgttatgcaaacaccattttagcaagaacggacaggtcttttttcacattttctgggtggtaactttaattatgcaatctaggcgactcagagccgtgtgccttagaaaatcgactggcctatttacgtcaggtggggattgaagccgatgatcgcaagttggctgggttattagggcgcaatatggccgatgtttggcgcatcattgcgccttcgaaagatgctctgcaacttcaagcaggttatgtggcctacaaacaggcccatccgattccgtatgcaaagattgtaatgccgggtgcacggccaactttacaatggttgaagcagcatgatatcaaaactgccattgcatcagcctcagatctgacctttatcgaaaagatgtatacagagacaggcttgcgtcagtattttgatcaattgcttagcggcgccgacttcacacgcactaaaccggcacctgatgtctacttggcagcgctgcaggtgctggacgtggctgctgaggaagcgatcgcggtggaagattcaacgcttggtattgccgccgcaaaagctgctggtctatataccttagcagtcccgctacgtgatccccggttcactcaaaatcagcaagcagcagatcaacggattaagaaactaaccgatattatgggaatagttgatgataaaaatgcttataatcaataagcatttttattttgcatttatattataaaatttatatctcgtggcttttagatacaaaagatcaaaatctaaaaagatattttttaaaaattgaataaatatcagttgttattattagcttttaaaaccacttatccgtataattgactctaggttaagggttaagccttgccaaaattctatgttgatgcacttaactgaaacactggggagtgataagtatgcgaaaggagcagcaaacactgcggatcttgggggataaggtccgttattatcgcaagttgaagggtctatcgcaggccgagctggcggcaaatatttgcacgcaagctacaattagcttgattgagaagcgtaataaagtgccaagcatgaatattttgatgcgattaattggtcgtttaggaattcagctggatgacattgttgtcgagcatcatgatcgtgttcagcaactgttgaccggtattgattttcagattcagcaccaccaatatgcacttgctgcggagaatttgagtaagattcggttggataagatcaagaatgatgatgaccaaaagcgctactattattatcaaggagttatcgaactattcaaaaacaatgcaccggatgaggcgatttatttctttggccgagtcctgagcccgttagttaactccgaacgtgacctttttggtattctagcaacgctggggttaggattggcctatgctgccaagcatacgtttgaccgatctcgagtctatattgatcaagcgttacgcatgttgaaacacgtgccactgtctgacagtaaatatctggatgttgagttgacaatttattggcacattgcccgaatttattatgaactcagtgactttaaggccgtcctcaaatacactgatctgggtgttcgagaggcagtcaagcacgataaacttttccttctagatgaattgtttgcattacaagcaagggcgctcaagcttttgggtgaccccgatgcctctaaaagttatcaaattgcgatcgcatttgcccgagtgacaggctcaacgtctttggaaacgagcttagtcgcagaaatggtctcgcaaaaaccaaatattgagacagcttgaaaaatcctcatagatgctgccgtctatgacgaaaaaaatacctgaaaacatcggctgatttaagagccagatgtctcaggtatttttttattttttaagcaggttttaatgacctatcttacttgaatattaaaattataatgattatttatcactgttgtcagttggctttttagtgcttgccagtgccggtttgttggccaaatcggtccggacaaccaagacatcgcaaagtgcgtttcgtgtcacatattcagtgacggacccaatcagtaagcgttcaacagcgttcaaaccggtggcgccgatcataataaggtcgatattcttagcctttgggatatcacgggcgatgatcgtcttcggagcgccatactcaatactgaaactgaccttgtccaatcctgccttcttggcttgatccacatagccttccatggtactcttcgcgttttctgtgacttgttcaaccatcgctgagtcaaaactggaaacgttctggaacgcgcgggtgtcgacaatatgaatgagaatcaattctgcgtcattccgttttgcaacggcaaccgctttcttgaatgccaactcagcttcgtatgagccatcgatcgcaaccaaaatatgttgatattgttgtaacattcctcatcacctctaccttcattgtacttgatttaatcatggaattaaatgaaaagcgtttcacaacttcatttgggtcagactaattagcacgaaaatcatggctaagaaggcaccaacgaccaaaatcacgagatttgcccagagcggaaagaaaagaccaccaatgatagcagcaatgccaacaaggacaaacaggcaagcaaatagtttaagaaaacgggttaatcccggtgttggtttcttaataatcaaaaagttttgttcacgatgcgaccatgtataggctgctaaggcaaacgttactacggcgtaaatgcccattaacaagagagtcacgagagtcctcctatctgttttctttattatgccatagctggcagggaatggcggggggatttttctgaaaattgagtgacttttagatgctcgtgttcccactttacattaacgggttcggtctacctgtaaggaccttggacgcgctggccaaagtgcaaccatcacgcctagggccacttatatgccaacttctaaacgctctggctcacgcttgaggctgcttttgcggaaggctataactgacgctgggctagctttctataacgcgttcgccagcccagaaacctgcacataaggacctcagccataaatggcaaaacccagccatttatggctgaggccacttatgctccggtttctaaccgggctagctcacgcttccacaaaaaaagccggcactgggccggccaaaaacaggtttggtttttttgaaaggctaattggtgccgttttcttcccggatcgttgaaacccgctactaactatgtgggcccagacgccagagacattagccgctaagtgaaatagcagcaccgtccaagactcttccggtcccaaggtctcgatactgttcggtcaactgatagttaaggaagcgcgaacaccttagaactttcatagttatagtagcacgggaaggcaagtagttgcaagcgtaaacgcttacgttaccttttcttagacttttgcgcatcacgctgccagtttttaagttgttgtagtcgctgagccagtgccgcttcgtatctgccggtggctttaggctgatagtagtgtttatttttaaggttgtcaggcagatattgctgtgcaacccagccgttgggatagttatgcggcagtttgtagtcgataccatggcctagttgtttggcaccgcgataatgggcatcgcgtaaatcatctgggatttggccggcattgccgttttcaacatcggcgagagcttcgtcaatagccttgataccggagttgcttttaggtgcgaggcaaagatcaatgacagcatcagccagtggaatgcgaccttccggcaatccgagacgttcagcactttgaatggcggtcaaggtgcgactggcagtggctggattggcaaggccaatgtcttcataggcaatgaccagcagtcggcgggtgatgctgttgaggtcaccaatggcgattagccgagcgaggtaatgtaaagctgcatcagcatcggagccgcgaatggatttttgaaaggccgaaataatgtcgtaatgcgcgtcgccgtttgtatcgccagccaaagcgggcttttgcagactttgctgaatggtagttagatcaattgtgatcgtgccgtcatcgcttgctggggttgataataccgctaattcaagcccgttcaacgctgatcgtaaatcgccattggttgcatgggtgagataatcaagtgcgtcaggctgtaagtcaacctgatagtcaccaagtccgcgtttgtgatcagctaaagcccggttgatggcgcttgcaatatcatctggcgtcagtggcttaacctgaaagatttgagttcggctgcgaatggctggctgaatgttcatataagggttttcggtggttgccccaattaaaacgatgcggccactttccagcaatggcagtaaaaagtcttgcttggttttatccagccgatgaatttcgtctagcagcaagataacggttccgctcattttggcctcttcagccacgatttgaagatcttttttagtgtcggtagcggcatttaaaatacggaaggcatacttggtgctgccagcaatggcactggcaatactggttttaccggtaccgggcgggccatagaggatcatcgagcttaatcgatgagcgctgaccatgcgacgaatgatgcgatctgggccaacaaggtcttgttgaccgacaacttcatctaaattttgtggacgcatgcggtaggcaagcggttgttgcaaggcgaaccctccttgtgtgtggcagttttaaaatagacattaactataggaagtacttttacctcaattttcaagtcaagtgcaacgatgataacgaattcttgatagtggtctaggctgttacgccatgcatcggtagtaatcgcatgggcgaagatagttcagaatacgtctgggacgatggttcagtgcggattggactgcttgaatttcaaccagggtaactgctctgagagacttccctttcgggaagaattccctaagcagtccattggcgttctcgtttgtgccacgctcccaaggcgagtacggatgtgcgaagtaaatctgggttccaacaatctctgataacttggcaaactcggaaccattgtcaaaagtgatactctcaaattccttggccccgtagtcgtcgatcgtgtcctgcaaggctttaaggcaggtgcccgcatgatagtcaggaatcttgacgatgatctcagtccggctgtaccgttctgtgagcgtcattaatgctggctcatcagctaagcgaatacctttgaccaagtcgccttcccaatgtcccacgcctgtgcggtcattcacggccgcaggacgcaactcgattgagtcgccgtatatcttcttattcttgcgcttgtgggcgttcttatagcctttgatgcggcgtcggagcttcttgggaagtgtcatgttgtctagctcaagcagtccggtgtcgatgtagcgatacacagttgtcgttgaagggcaagccttgccctggtcgcgatagaagtgtacgaagctatcaacgctgtgtacgcgcggccggtcttaagaaaggcgtagtgaccggttctatcgcgtttacggtcgtgcatggcttgggcagtttccgcaagatagacttgatgcgagtgacgcttcgagtcgagctgagttacagatccacgcgtgatttctcgtgagattgtcgctttactgcgatgaagcttctgtgcaatcacggtcgcggtgtcaccagcagcctgaagggcctgaattgtagcacggtcgctaaaactgagttgttggtaatgcttgtgagtgttagtctgagagtgggtcatgaagattcctgctttcttgtttagctagcactaacaagaataggtcttcatggcctttatggtctagtcgtcagggtgttgcacttgaattgtaaactggggggaagtacttttaagatgattgacttagtttagcatagaggtgtgactttaaaataggcggttgttgttgcacggggatgcttatgctccggtttctgatcgcgccagctcgcagcttagattaaacgcgctcattagcccagaaacctgcgtgtaaggaccctgaacgcaatgaccaaagtccggtcatcacgctcaggcccgcttacactccggtttctgaccgggctgattcgcgctctgattaaacgcgctcgctggcgcagaaacctacacataaggacatgaagcctaaatggtcaaagcccaaccatttaggcttcatgccacttatgctccggtttctgatcgcgccagctcgcgctcttgttgtctgcgtgttaatctaattctagatcatcaaataaaggaatgacacatgttgaatcattattggcaactgatccagaaaaataacttgtttggcttacgggacgacactcgaatcggggtgattcggacggtgaagccggtgttggcggaagacgagcagctgccagtgtgggcgaatgcgagtcggcatgcgttggtgcagcaggtgtcggctacaatgttacagttgacgacaccgcttttagacgatcccagcgaagttgtggcgtatttgcgtgcgggactcagccgcgtctgggcagcgctgccagaaaacggcaagctgccggttttcaccgccggattggaaaataatcagcgcattcgcattgttttgccggaagtgttgtttgagcggctttatacggcggaaaattttcaagggaatggtcctgattatgtgacgtaccggaatcaaatttatgatttggtcactgatgggttgatcacacaattgccgttactgacttatctctttgccgcttcaccggccaaaaacggccgggcattttggcctgcgccggatcaggaacggcaactggttcaaaaggtcagtgaccctgatcacttagcgcgaacattggctttggatgttgcagtggaacttgatccttatgcggcgagcggtgttacggaacaaatgttgaactttttaatcgacagttgctggtttgctttgagtcaaccagcgattccattgcccgcggcagctgaggtgcgtctgcatagtttggcagaagcacagaagattgctgctggcgatcccacggcaccggtcgcgagtttgacagcaccgattgatgccatggcggtctggctgaatcaggtcggcctcacaccgcaacgaaaacaagcttttgagttgatgcaaagccgagtcctgaagccagaaacgacgattgcgggtcaggtggcggcggcttatcatgatatttcagcagctcaaacaccgttagcaacgcaagcccacgcagatttgtcaatggaagaagatttaccgggcttcagtaacttgtcaggcaacagtcaagccttgcttcaggcagtgattgatggcgggtatcagtggaccttgctggatcggggacagaacattctgcagattgccagtgatactcagcgccatgtgttgattgacggtgcgttgactagtcgcacacctgctagtgccatggtggtagcagaacatcgccatgccgccaaaaaggtgttagcggcggctgggttacctgttgccagaggcgccaagttcacacgttggcctgaagctaaagctgcttttgagcaaagctttgcccgtaaaagtatcgtcgtgaaacctgaacagcgtagtcatgggcttgctgttgagcaatttgcggtgccgccaactgccaaacaattcgcccaagcctttcacgctgctaaccaagatcacggcgtattggtcgagatgatggggcggggaacaacgtatcattttactgttataggtcgccgtgtggtaagtgtgttggaaaatgccgctgccaatgtggttggcgatggtcgtaaatcaatcaaagaattgattgcgttgaaaaatggtaagcgaccgaatgcacgacagctcaaacttgacgaaacagcaaatcggcagttgaagttacaatcggttacgatgaatactgtcttgcggcgcggtcagcagattttccttgcttctgcggcgcatccgcaaacaggtggcgatatttatgatgttacaaccgaaatcgatccaagctacaaccaacttgcggttgccgctgctgatgcgcttgaattgccgattgccgccgttgatatcgtgattgataatctttatgacgcctatgctgctgagcatgaaggccaagctatcatcatcagtgtcgatccgattcccgacttaatgttgccacaacaaccagatatgggcgcggcgcattcaattgcacctgctttactcacgtatctgtttagcgaaaaataaaacatctgccgtcatgttcggcagatgttggttataactttttaaaaaaatcaaagccacgttttttcggcttttcagaatcttgctcaagtggtggcagatcaacattcgattgattaatcgccgtgtcggcaacaatcagcaatccagcggccttgtcggctgtttgcgcggtttcattagccaccagcgtgaatggcacattcgcatccgtgagcattttcatataggggcctgtgatggcattatcgagtttcccgtttagcaacgctttataaccatgagcgtgaaagtctttgagtaaaggctgcacttgcgcttgtcgtttggggtcggccaatgcttgattggtgacctgtagagcaacacgttctcgcaaagagcccatataggctcgacgttcatcgggtttggtctgcgggggaccgtaaatcgcactgttcagatgttcctgcatattatcgtctgacattaatggtgcctccttttaaacgcattcatatgccctcattgtaacatgttcttgtcttggaaaagaggttgtggttctgtttacacttgaagatttcgccgtttttaaggcgacaacgctggcgacacgaatgcatttgattcgcgaacaattggatcccaagtttgctgaggccgccacggtgattgtgccgctgctgcaaacagatcagcagcaggcgatctattcgcacattgcgaagcatcaacgtcgctatcgcaatccgccgccgaatacctgggtcgcgttttcaaccagttcacgcggttacaaaatggtgccgcatctggcgctgggcttttgggatgatcggctcttcttgtggctgtcagttttacgtgaaagtaagccggcgtcgcgggtattgacggggatcaccgcgatggcaacaaccttaccgggaaaatggcaagtggcaggggagcatacagataaggcgatgttaccactgacttcagccaatttagcgacagttggggctcgatttcagacgattaaaaaggcggagttccttctaggaaaagtttatttggcagatgatccgatttgggcagatcccgtgcggctttggcaggacatacaacagcgggttgtcgcccttaaaccaatgtttgatcagttggttcaaaacgtctaatgtcggggtgatcgcctgcaaatggatcattttgaatgctttgtatgagaatgccgcgagaattcagcgaaacctgtccgccgccatgtttagggtggtagaatcacactgtggtgttgctcgcctgcgcgtgttggtaaagttttggcgaacgcctattttgcctagttcaccacttggattagctagcaaactgcatcatgttaaaggagaaaagccatgccagatgtacgatttcatagtgtgtttgatattatcggtccagtgatggtcggcccaagtagttcccatacagcaggtgccgcccgaattggaaaagtggttcgcgatatttttggtgaagcaccagaaacgatcacgatttacttgtatgaatcgtttgccaagacttaccgcggccacgggacagatgtggctttggtcgcaggattattaggcatggcgccggatgatccgcatctacctgaatcaatgaagcttgcctatgatcaaggcattaaggttagctttgtaccgaaaagcgacaaagttgatcatccaaacacagcgcatatcgtgctgcaaaaaggcgaccaccggctagccgtgactggggtatcgattggcggcggtaatattcagattactgaaatcaatggctttaaaatttctctgagtatggggcagccaacttatattacaattcatgaagacgttcccgggatgatcgcgcaggtgacgaaaatcttttccgatgctggtattaacatcggtaccatgactgtgactcgcgaatcaaaaggcgagcaggcgatcatgattattgaaacagacgactatcaagatgatattttggctaagttgaaacaattgccgcatatggtgaatgtcacttacttcgaatgacagtcgtttttaattgttgtccctgatgttttgataaaggagtcgcctatgttttataccgtcaaagaattgattgagcaaagtcacgcgtttccatctgttgctgcgttaatggtgcataccgaggttgaaaactcgacacggacggaggcacaagttcgccatcttatgagccgcaatctggaagtgatggaacgatccgtcaaagaaggcatcgctggcgtcaaaagtgttaccggtttgactggcggcgaggcgaagaaattagacgcttatgtcaccagtggtcagttcatgagcggcaagccgatcatggaggctgttcgcaatgcggttgctgttaacgaggttaatgccaaaatgggcttgatttgtgccacacccactgcaggatcagctggcgttttagctggtgttctgcttgctatgcgtgatcggttgcatctaagtcatgatcaacagttggattttctttttaccgctggtgcgtttggcctagtgattgccaataatgcgggaattgcaggtgcagaaggcggctgccaagaggaagtcggttctgcgagtgcaatggcggcagctgcgttggtaacggctaatggcggtacggtggagcaagcagcgactgcagttgccattaccttacagaacatgctcgggttagtctgtgatccagtcactgggttagttgaggtgccgtgtgtaaaacgcaacgcgctgggcgccagtcaggcgatgatttctgctgacatggcgttggctggttgcatcagtgttattccggctgatgaagtgattgaggctgtgaatcgtgtcgggatgcaattaccagcgaccttacgggaaacaggcgaaggcggcttagcaacgacaccaaccggattgcgtttgaaagaggaaattttcggtaaataatcattgtcagtcttggctatttcaggacgtgatatttgtggagatgccccaagctgggtgttagcgtcagttgcagtttaaacggaaacacaggaggagctcgtgattcatttctatattgttcgtcatggggaaacagccggtaatgtcagccagttaattcaaggtatcaccaattcgcaactcaatgcgcgtggccgtaaacaggcattggctttgggccgcgggttgcgggcaagcggtttgatgatcgaccgagtcgttgccagtgatctgcttcgagcacaggaaactgcgcaacaaattttactgggcatgcaggtaaagctggcaattgaaaccgacaaaggactgcgtgaagaaaatgatggcgtttttgaaggacgatcgttaaaagatgtttcacaggaggtttttggtgttccggattatcacattcttgtgcgcagcggtaaaatgccgctggaagcgattcctgatgggatacacgcagctgatgcaactaatcaagctgagaatacgcaacaagtggtttctcggtatgattttgccatgcgccgaattgtgacagccgcagaagctgcgaatgagaccaatgtgttggtcgtcagccatggcacggccagtctcctgtggttacgagcgcatggtggcgatttgccaaatcggaccgaactcacgaatgccagtgttagcaaggttacctatgacaacgggcgatttaaggttgactggatggacaacactgagttccgtgatcagggattaaaagaagaattatcttaaaaatattgggaaagcatctgtaggcaagacgactatggatgcttttttaggtgcgcagttgtctatatgttaggaggctcggttaggttcatcaggacaaaaaggttgtgcgctatcgaaatttgctgttcgcgcgtatacttgccttaagatgtgggctggcctcgtttttgtgaccgtgataacttagtaaaaataggcaagcttattcatcgtcgttaacttgataagcacatttaaaaggagctggtgacatggagcgagacgtatttttagctaaggtgactaacttgatgcttgcaccgggaacgcgtgcatttgagcgcgaacaattgcgccaggccaaacatttggtagaggccgggcgaccagtggcggaaggctgggcgcaacttgaatcatctttgcggccattggcgatgcgtgataacctgaccccggatgtggctgacttttatcgagcagagaccggtgatccagcaggggctgtgcagacagatttgagtgcccattttgatcgcgacgtgccgtttcaggagcgggccatttttgctggcggttgtttctggtgtatggttgaaccattcgtcgatttgcctggtatcaccgcagtcacttcggggtacactggcgggcatagcgcacatcccacttatgaacaagtgatcggcggctataccgggcatgttgaagccgttgaaattatttttgatacccgcaaaatgagctacgcagcattagtggcgctttattttcagttaactgatccgactgatgcactggggcaatttcaagatcgcggcagtcaatatcgtcctgtgatttttgtcaaagacgatacgcaacgccagatagcggaagcggctaaggctgaattggctgcttctgggcgttatttgcggccaatcatcactgcaattgaacctgttgcgactttttggccagccgagaactatcatcaagacttttataaaaagaatccgaaacgctaccagatggttgaacggacgcgccgccagtttcttcaatttcagcgtgcacaaggcaacctgcgggtgatgttgaaacggcgtaaaaaggcataaattcttgcagtcaaatggcagttgttgttgaaacggaggtagtggcctatgcgggaaccgatacgacattggacgcaaaagaatatgcctgatcttcacggcagctatgcggtggtaacaggtggtaccagcggagttgggtttgcaatgagtgctgctttgttgcggcacggggcgacggtgatcatcgttggcaaacaggcatcaaaaggcgtcactgctgcagccaagttaagggcgcaaaccggtcaacaaaatgtcacgtttatgggcgctgatctggcggatcaagcagccactaaacacttagccaaccgcctgctgaggatgcttcctaagctggatattttaatcaataatgccggtgtgatgatgcccgctaaacgtaccttgacccgtgacggcctcgagctgatgtgggcagtgaattattttgccggatttatcttaacaagcgaactgatgccgctactattgcgatcggatcatgcccttgtggttaacgttgcctcaatcgccatgggtcgaccacatttgacctttaatcagtttgatggccatgactatcgcccttggacgatttatacgactaccaagctggcgcaagcgatgatggtggttaagctcaatcagctattgacagaggcaggacagtcggtgaccgtgactggctcaagtccgggattagccgcaacgagtttgaaaacaatcagctcacggaaaactgcgtggttgatgcgaatgggtgcgttgagttttcgcttgctgccgtttctccggcagtcgccagatcaggcggcattgccagcactgtacgccgcaactgatcccaatgcgcaaggcggcgtgatttatgcaccacatgcatggcgtggtttgcgaggttacccggcattatgggcttggaatcagcggcccgaattacacgatcagaagttgcttgatcgtttatatcgggcttcacgcaatgtaactggcgtatgattgccattttgggtacgttagattttctaagaagcgactttgctaatgccccaaaagcatcatttctgctgatcccatgctatttttgctgtgattagcgttgtgtaagcggttcacctaaaatggcacatatagtggtgagcacactcgctaacaccaatatattgtatattcaagacttacatttaaaaaaatttgttgcataatagagcatagtcgttgtcaatgcaacgaaaacgaaagtttaagggagtcttgtttgtgcaaacatctgggaattattttagttggttgatgcatcagttgaaggggtggccgcagcagaactattatttgttctggtttgcttttgggtgtcagttgatgacccttgtagatgctaagataacccccgtgactatcattacttttattgggacaactttgggtgtgctttgcgtcttggccattaatgccactaaagcagtcaatgggtggttaggtcttttgagtgccgcatgttttatctatgtcggctttatcgcccgcaattatctatcaatgtttgaacagctagcctatgtggtgacacttgatttgccagttttgattagcgttcggacttggaatgatgatactaagaacaacttgaagacattcaatgcccagaaatggatgctgtcaattggctttacgttgattgtgtgggcggtaagcgcctatttgatcggccagtttaccaatgatccgcggccgatttttgatggtatggcttttgcgatttcattgactggtgggattgtttgcttcctgcgatacaacaatcaatacttctggtggttgttcagtggcgtggctcagctcgttttatgggccattacttttgcgcaaggggatgccagtttagcgatggcgattaatgccagcatttacgtcattaatgatattttggccttcacggttagtccatggttcaatcggggccgcaagcagctgggtctaaaaacgatctaagtggtgctttagctgtgtttgtggtaatgtttgttgttggcgcaacataataaacataattgaggagcgagatctgtgatctacattttaggcagtattggtgcaggaaaaacgtcgctgacaaaagttttgtcagaagatatgcaggcaccggcatattatgaagatgttgaaggtaatggcatgatcgccaatatgttgcaaaaattttatggtgcaggcgttgagagtcgtaagcgaaccggcgcgatgttgcagattgcatttctcacgttccgttaccagcaattgaagaaggctgtgacccaagaaaacgcgatcatggattcttcgcttgaatcagacttcgtgatggcctcgcagttgcataaacacggtgaaattgatgatgttgatttcaacgtttatgtgacactgtctcaagagatgcaaagtaatgtcaatggcagtccttggaacggttttcctgatctagcagtttatctgaaaattgatccagatcacgaaattgacgaaattcaaagtcgtggtcgcgatatggaagatattcgcgaaaagccggagttggtcgattactatcggcgtgtcaacacagcttatcgtgattgggcaaagggttatacgcgctcgtctatgattacaattgatcgtgatcgttatgactttatgcactcagcagctgaccgtgccagtgtgttggatcaaattgaaaccaagcttgttgatctcggcaaattatctccgcaagcatttgatgcgttgcaagcgcaacatgcagatgggccgatttctaagtttgcatgatttccagttaaattgttagaaacaacgacctgtgtcatcctcatttttaggggataacacaggtcgtttttgatttgtttcataaaacatgttcacaaacacagcaactcggtcgattcacgcgatgccatctgttttcgattgcaagttcagtctatgatatgcttatggtataagaagtcatggttcgaaaccctaactagcattggttgtcagtagggtaaaggacactgaccccactagaaggaggaactcattcgtgacaatttatgatcagcacatgcataccttgtattcatttgattccgaagcccaactccgtgattacttaacgcagacaaaggcgcctgtcgtgacaacagaacatttagagtttgataatcctgatgatggcggccgggataatctgcctgattatgctaggatgaaggcaacgcaggcggctctggccgaaaaatttccgaacgaattcttgcttgggatcgaagctggctattttgctcctgccgatgctcgattccgacagtacttggacaaccatgactttgatttgacacttttgagttttcatcatgatggtcattacgattatctggatgagcaattgatcaccatgccagctaaacagcagcttgaagattactttgaacggatgctcgctggcctcaaacgatttcatgatgccgacgtcttggcacactttgactatgccttgcgccgatttgacatcacaccggaccagctagaagcttggggcaagccgttgttggatcaaatttttaccattgccgtcgaaaatgacttggcgttggagttgaatacgaagtcaatgtatcgctggggcaatgcaccactgtatgatcaggcgattgcttggtatcaagcagcgggtggtcacttgtttactattggcagtgatgcgcatgaaggaccgcaatacgaggcaaactttgctgatgcgctagcgatgcttaaacgtcacggggtaaaagaaatcgccacgtatcgtcaacatcagcggacaatggtaccgattgagccgccagtgattgatgctgataatgcttattaattcggccgagccccatctgacctatgattgatccgccttggcactgacgtctttaagtcgcagtgatttgtttagacgaaataaaaagcgaacaattttcccaaaaattttgggaaggttgttcgcttttatttgtcagtcgcgcattataggaaagcctgttttgctacgtaacgccaagaagcgcttatttcagataggcgtaaacaaagttgaaactgttgcccgggctcgtcttcagatcatggatcttcggattaaccatgcgtgctgcaacgagttgatacagcgggatggcaccggcttgattgaccagcaactgttcagcttcagtcatgtccttgaagcgggcagtcgggttgttagcatccgcaccgttactcttagccatgagcttatcatagtcagcattttgccactggccatggttgtattcactgttactcgtgaacaaatcgagataggtgttgggatctggataatccgccccccaagtactgaggaccatgtcaaaatcgtgggtggcagcgcgctgctgacggttcttagctggcacactggcgatactgattttgaggcctggcaaattctcttgcaaagcaccttgaagatattcttgagttgccttgactgcatcaacatcatcacctagcagctcaacatcaactgttttggtgccaacttctttcaggccttctgcccacaatgtttgagctttcttcttattgtaggttgtgatggccttcgtgttcttggcgaccgctgtcgcataatcggtgctgctgtccggcaactgactgagatcagccggggtaatgccacgggcgacaatagacccgtcagctaacacatttttaacaaaagagtcgcgattgatcgccatggagatggcctggcgaatcttggtattcttgaatgccgggaccttgttttcatttaattcaaggaagtaagtccgggcccgtttagtggcaacataaccagtcttgcccttttgttgggcagcgagctggccggttaaattggcatcgtcaagtttaccagtgcgatataggtcaagtgccgtattggtatccttaactacctgaacgtcaatttgcgtcaaatgaacattctttttgttccaatagttggtatttttaacttctgtccatttatcgccagtgccggtccagcctttggatttaaaagcgccgttcgacaaagtatattgcgacttggtaccgtacttggcgccccatgccttaaccttcttagcaggttgcgggaaaaacgcaacgttatttaacaagctattgaagtaaggaatcgggtgttcaagcgtgacttctatagttttatcattaatagccttgatgcccagatctgttgccggctttttgcctgcacgaatgtcgtccgcattcttgatgccagagtacatgttggcctgagtggacttggtagctggatcaacggttcgctgccaagcaaaaacgaaatcttgggctgtaaccggggtgccgtcactccacttggcattgcgtaacgtaaaggtgtaggtgaggccattatttgtcggcttcacgattttggtcgccatggctggttgcaggtcgtgaccgtagtatttatataacccgttcatggtatcaatgatagcctgtccggagacaccttcagatgctttacttggatcaagcgtttgcaacacatcggcttccattcggtgccagacctgttgcttgctggaactagaactgtccttgctcgattgggtaccgcatgcagtcagtacaaaagtgagtgctgcagcagcaaccacaagccatttttgttgtgttttcaaatcatgcccctccaatttgtaagctgttactagaatagcaatctccttacaaaaagcaagtgttttgtatgaactgatgctttttgaatgacagcttaaaaacccagttcacgaatggactaggcaaaggcgtgatcttagacgttgtggtcgcgaaaggtgagcgtgacagcaaattgttgcctgtctgcttgcagcgtcattttcccgccaagcgtggtggtgagtgattgcacgatgctcagacccaagccgacgctttgggttgtccgagccgaatcggttgtgtagaacctgtcaacgagctggtcagcattcgcaagcggtttgtcggtgttgttggtgaaggtgatggtcaagtgctgctcatcttggcgaacgagcgtgacactagcctgattcttggcatatttcagccagttaccaataagattttggaaaactcggcgcatcatcgtctcatcggttgttaaaacaagattgggcgcgatttttggggttacctgcataccattggccgtcaattggtcaaaataatcaaataattcagtttcgagtaattttgataagttgataggttttagctttaacgccgtggatttttcctgaatgagattgaagtccatcaggtaatgtaagtagtaattaacagatcgcaaattgtgtgccacgcgggccagcgattgtttggcgtcggcgtgcggatcgcgatttagaagttgaacgtagccagttgcgacggtcagcggggttttaatatcatgcgtcaaattcagcaacatctgatgaatctttttttcttgcgcaatttgctcaagccgcaactggcgggtggcattcagattgtcattaatcccagctgcgagtttacgaaccaaaggaaaattggtattggttgtcaccccagcgttagtctcgatgtgattaatataggtgagttcgtgattgatacggcggatatcgatgatgatcaacaaaagagtgatcgccaatacaagacaaatgacgctgagtccgatgatgataccaagcatagccttctcctttgaaaaacatttttcgattgctagcagttatccttaaaaatgatccgtagctaactagctatatcaaccgaacgccgatgccccagattgatacaatatacttcggatcttttgccagatcattgattttggtgcgtaaattgctaatgtgcacgttcagcgtattatctgcgttcatgaacggctcgccccacacatgctcatataattgttgtttgtcgaaaacttgatggggatcgcgcatcatcaacgccagcatcgcatactcttttttcggcagggtcagcggtcgattgttgacagtaaccgcatgacgtttgagattcagcgtgatttcaccaacctgtaactgatcttgtgctttagccgatggtgcaggcaacgtttgacgcaactgcacctgaacccgagccaataactcgtcaatgtcaaatggtttggttaaataatcattggcgccttgttgcagaagcgcgacagttttttgcttgtcttgaatggcggtaaggaccaaaactggcacgctagacgttttgcgaatggtcgtcaaaacactttcaccggtgacgtttggcagcattgagtcaagaataatcaagtcaggtgcttcctgatgaaattgtgctaaggcactgataccgtcataagcttggatcacagcgtagtagggtgataatacatctcttaacaaggcttgaatatcttgatgatcttcgacaattaagattttgcccatgctgtcacacctcctaaacgcggctgctcacgctctctactaaacgcgttcaccagcctagaaacctgcgtgtaaggaccttggctgcaatggtcaaaacccgaccatcacagccaaggccacttacactccggtttctaaccgcggctgctcacgctctctcctaatagtgtaagctataagagcagtttttcacaatttaggtttaattaaggattcattatatagccagttaagaaaggccagttaagctgattttgtaagcaaaaagcggtgacaaaatggtggagggagattgctatgacacaatcagtgttaacgattgaacatgttagcaaacagtttggacgttttcaggcattagatcaggtcagtttcacagttgaaaaaggggatatttatggcttaattggcgaaaacggggcgggtaagactactttaatgcggttgattaccggcttgtcaccgatgcagcacggaaccgtcacattactaggtgagcaagctggtcactatcaacatgcacttagtcgaattggagctgtgattgaaagcccagcagcgtttgagaagttgaccgtttaccaaaatttgcggttgtgcgcaattcaacatggcattcaagataaacaggccatcacggaagccattgattttgtgggactcaaagcgaagcaaaccaccaaagtcaaacatctttctttaggacagaaacaacgactaggtttggcgttagcgattttaccgcgtccggattttctgattcttgatgaaccgattaacggccttgatccttcgggtattatggaatttcgccaattattgaaacgcttgaacgaggagcagcagacaaccattctaatctccagccatattttaagtgagttgtatcaagtgtccacccgatttggcattattcatcatggacggatgatcaaacaactgaccaaggctgagctggataaagccaatcaatcaggcttagcggctaccgttgatgatacggcactggcagcacaggttttggatcaacatgggtatcaagattttgacatcattgacgatcatcatcttttgttgagacaaccggaagttaatgcagcggcggtgaaccaattgcttgtgaccagtggcgtgggtgttcaggatatcagtcatcaagctggatcactggaacaattttacatgcagttactggggcaaacagagaagcaggaggggcaagcatgattaatcaaattcgggccgacttctatcgccaaatccatacaacgggcatgtacatcatgcttgtgctgacgattatctatgcggccacgacaaccttgggacagagtgttggcggcgtgacagtgcgtggcgacagtggtcaatttgcccaagttgggggtaaatcgtggtcagttttaactggcattaaagtggcgaatatgggtgaaacgatgctactttacgtttttatcggcgtttttgtcattgttttcgggtatgagttcagtccctagattgcataattaaagttaccacccagaaaatgtgaaaaaagacctgtccgttcttgctaaaatggtgtttgcataacataccatctagagagaaggacaggtcccatggccattataaccttaattgaacgatctcagatagaactgatgcaacaccacacgattcaatacatcgccgcgaccttaggccgctctcgtatttctattaggcatgagcttcaccgttgccctgaaggtgattactgcgccattatagctcaggatcatgccgatacttgtcggcatcgttgtggtcggcactcgattttaacgcctaagttgaagcggatggtaactgagaagctaaacctaggttggtcccctgaaatggtcggttatgccgttcactgtgcgccacacacgatttaccactggatttatcaaagacaagtcgattttcagccaagccaactctttgatcacggtaaacgtcataaaagaagacaagaccttcggtcgcgctataaccaagcagtaggcacctcaattgagattcgcagtgagtcagctaatcggcgaaccgaaaaaggacatttagagatggatacagttcgcggtggtcgcgggtcaaaggctgctgttttgaccattgtcgatcgggtcacacgtttaatggcgacaactaagcttgaaaacttatcacaaaatgctgttctcaagggttttgcaagactgatggtggactttccgggtccggttcgatcagtgacggttgatcacggtaaagagttttcctgcgatcaggcgcttacaaagcgctatcggataccggtttacttttgccacgcctatcacccgaatgaacggggcacaaatgaacggttcaatcgagaacttcgctactatttcccgaagggaacacagtttgatcaggtttcagagaccgatattcaacaagccacagcgcttatcaataacaaacctagaaaatgtctccgttggcaaaccccagttcaagcagtgagcaagcctctttctaggtggtaactttattattgcaatctaggagtcaaaaggtttacaaaaacaccttaatctcgggtatctcgcggttagcgtttgtcctagccaagtatttggtgatgttactggacttactgctactattcgctgtcaatttcctaaccgtactgatggccggacttgttgctggacgcccattaggcgggagcttgggaacattgtttggaacctttagtctgagtttcgtggctgcgaccttctttgtgagtgtgatcttcagcattggcgtgttcctgctggtattaactgggtcgattatgataccggcgattgtggtggtggtcttccccctcattgttagtgtgctccatgtactcggtgagtgggactggattaaatatatcgacttcttcggcgtcgcccaaaatatcggcgtcggtggcatgaaggttagtgcattgccaccgtacatcgctgtcagtttagtgctattggttgtgatgattggcccgtcagcattaatgttgcgaaacaaggaactgtaactgactttttaagatttaaaaatgatccgcattttggctagttggccttgtgcggatctttttttagttgcctgctaaacagtctcgattaattggttgaaaatttccaaaaatttctgagcagcgccagacattgggacgtttttcgtccagattaaggccatcttggtggttagtgtcggagaaaagggaatgaattttagctgcatttcatcatggccgattaaatggctgagaccgacaatatacccggaaccgagttgagcaagcagaccagcattgtaaatcaagttgtagcgagccacgacttgattagggttaaaagcgtggccggcccaatcagtgagcattttgacaacaggttcgcgctccgacacgatcaacgcctgaccccgaatcgtttctggtgaaatagctgtttgcgccgctagcggatcagaaatggggatgagcagtccccagcgattttcacctggaatccggcgataggcatatttataagtgtcagccggatcaatcacgaccccaaaatcaagtaaaccatgatctaaccgctccttaatatcatcggcattgccactgtacagctgcagtgtcacatcaggaaaagcgtcgatcaattgttgcgctgcctttaacacaatctgattaagccgtgactcgccaagaccaattgccagcgtaccactgacggcatggtcatcgacaatgtctgcaaccgcagcgtctgtcaacgtgagaatttgtctggcgcgattcaccaaatacgtcccattagcggttaaactgatcgcccgactttttcggttaaacagctttgtaccgagttctgtttctaattcctgcatttgtcgcgacaaagcaggttgtgaaatatggatggcattggcagccgccgtaatcgtgccagcgtcggcaatcgccacgagatagcgcaatgttcgtaattccatgaaaaggcctccgatacataaggaaatatcataatactatatgttatataagcattatacattttaagtcatcggatcgataataaccttaaacattgaaagaaggcattcgtcatgaatgacaagaatcaaaacgccggacttttcggcttaggtgaagctaataccgcttaccaacagtattttacgggcaacagttatctgaatggtttggtcgccgcggcagacgagatcgatgtgactgttgccaacgtgacattcgaacctggttgccggaacaattggcatattcatcacaatggatttcagattttactggtcacaagcggtgagggctggtaccaggaagccggtaagccagcacaattgctgcatcccggtgatgtggtcacgattcatgaaggtgtgaagcactggcacggtgcaactaaggacagctggtttagtcatgtggcgatcaccaaaggtactagtgaatggttggaacctgtatcggatcaagcttatgcgcagctaatggaggcacaataagatggcaaaacaaacagcaggacgcaaacagttgggaaaatttgccccacagtttgctgcattgaatgacgatgttttgtttggggaagtttgggcaaaagagaatgaactgtctgcccatgatcgcagcatgatcacgattgcttgccttatgaccagtggcgattttccacaactcaaagcccatttacaattaggaaaagaacacggcctgacgaaagaggaagtcgttgctgaaatcactcatctcgctttttacgccggctggccaaaggcgtggtctgcgtttaatctggcgaaagaagtgtatggcgaatgataaacgtcctcatacttggtgctgccagtcagatttcacgctttttaattccagatttgttggcagataaaactgtgtacctgacgctatttgcccgccaagcaccgcaacggttagggcaatatgcaggtgagtcgcgtgtgacgttggttgacggcgactggaatcaagaagccgatattgaacaggttatgtcgaatcaagacatcgtttttctggcaagttccagtctcgtcggtaatcaaaatgttgtcacagtgatgaagcataccggtgtccaacggttgattgtcgcaggcggccttgggattgacgatgaagttgccggcaagtttggcaactggaatacgcggatgatgggagattacacaccatacaaacaggccgcaaaggtgatcttagacagcggtttgaataccacttatcttcgcatgacatggttatacgacgaaaacggcaacgaaaagtatcaaatcgtgccagaaggccagccattgcgcggaactcaggtaacacgtcaagcagtggcgaagttagtgactgccatcgtgagacagcctagcttataccagtacgcaaatattggcgttgttgaaccggggactgagtgggacaaaccctcgttttattaaagttgcatgattcatctgaaccaccgatcaattcgcaaattagaattgatcggtggttctttaattttccgtcaacatgtcccagaagagagctaggattcagattgtttgttcagttttctagttgttttctgtataatcgtaaccataagtaaataagccttgtgatgatttttgtcttgttgtggtcagattggcaaaattactgtcgggaatggcatttgggggattttggaggaaggaatgcaaagtaaagcagggacggccgatcagggatgggctttagaagaaaaactggacgaatttaatcggcatcagcatcccttcaacggatcaggtgccgacgagtcatttgcgtacgtcatcaaaaaaggtgaccaagtggttggcggtgttgcggcgagttcggatgacaatgcgattggttatatcgagttgctctgggtagatgaaaccatgcggcgacaggggttagggcgtgccttgttagcaactgtcgaacaagccttgcaagctgctggttgcaaaagggtgagattagaaacttttgattatcaagcaccagcattttatcttgaaaacggctatcacgaatttggcaaacttaattacgactatgccggtgtgattgaatattttttcgtcaaaatgttatcgctgccaatcggctacaacataccaccggctttttcgattgaagcagctgaagacctagcgatggaagccattgagaataaacttcatgcctacaatgtgaaaatgaaaccactactgcaacaaaaaatgggtgtgacttttacttttttagcggaagaaaatggccaatgtattggcggcattttcggttacagcaccatgtataaaatcggctatattgaaagtctatgggtagctgaaacgaacagacatgcaggtgttggcacggctctcgttgatgttttagtaaatgccttaaaagattttggctgtccgattgttcacctcgataccatgtcgtatcaaggtgcggcgttttataaggcacttggctttgagcaatttggccagctgacctacccggaaattgacgcagcagaggtttttttcgtcaaacacttagtttcagttggagaaaggacaataaatgccaacaaataaaggtatcacagtcgctcgcgaagaagatccagatctaaagcaagcgattgtgcgggctgttttggccgatttgcccgaatggtttggcttgccggatgcaactaacacttatgttgaagaggctgcaaaactatctttatgggttgcttgctatgaaggtcaggcgattgggtttatcgattatcgccaaaccagcaaggcaagcggcgaaatcagttgtatgggcattaagaaacactttcatcatcaagggattggccatcagctggtaaaggcattagaagccgacgctaaacaacatgcccactacctgcaggtaaaaacggttgatgaaggtcattatcctgaatatgatcaaaccatccgtttttacgagtcagtgggatttgagcgattggaagttttcccgacattatgggatgcttggaatccgtgtttggtgttggtcaagaagctttaataagcggccaaatcgcccagaacaaaatcaataaaaatcgccatgcctgacagaacagatcggctcgtgtaaacttgatatgcgtaagcgcattcaaaacgagggattagtatggtgccattctttcatgggtcacgatgatctcagaattatccacatccattctgttgtacaacgtcaagactcggacaatgacagtagccatttataccgaagttattcgtggaaattacagcgttgccgctgcactatcaacgattttgaccgcgttaacagtgatttccttgctaatcttcatgaaagtttctaagaatggggatagtgcgatgtaaccacaaaacttcgtcggaaataggacaaaagggagttgaccgtaactggttgactctctttttgctgtggaagcgacttttgttggcaaaatggctgaatattcacatgaacgaaaaagatatatgtggtgaacccatttacatctagtcttagaaaccatataatatggatattaaagccgcaaggaggcagaacatgaccaaaaaaattgcaattgtcgttgattcgggttctgatgtccctcaaagtgttcttgatgaaaataaaaatattgcagtcgtaccgctgaatattactatgaatgggcataattaccttgatgcagttgatatcacaccggatgaattttattcggcgctagcaacggcagaaacattgccgcagacttcaagtccgtcaccgcaagctgccaaagaggcgatggataggctgtttgcggctggttatcagcaaatcctcggtatcacaatttcgagcgcgttgtctgtgacgaacaacgtctttcaattggccgcgcaagattttcccgctgacaccgtaaccattcttgacacaaaaagcatcggcattggcagtggcatccaagcagcctatgccgcatcattgatcaatgcaggggaatcttttcaggacgtgattgcaaaagttcgtgcctcaatcgtcaaaagtcggatttatttctacgtgccaaccttgaagtacctcagtgccggcggtcgaatcggccgagtggcaggccttgtcggttcggttttgcacattaaaccggtgatctcatgtgatccagaaggcgtctactaccctctttttaaggcgcgatctgaagaaaaagcgattcggaaattggttgaacaagtcaaaacggattgcttaaatagcgctcattatcgtctaggagttgcccatggtcaaaatccagctttggttaaaaagttggcagaaaaattgcgcgaagtgactggtcgaccggttgattttattggtgagatctcgccgtcattgggggttcatacaggaccgggactgattggggctacggttcagtcgtattaagcgtcacgagaatgagccatgcttcatagacttgacctgaactgacatcaaattaacaatgcccgtttctcaatatgttgggaagcgggcattgtttgttttgcttgatagaatctgttactccaaccacttattcttcttagccatctgcactgcctcaattcgattatgaacaccgagcttactaaagatagcagacaaataattgcggacggttccttccgagagaaacagcgatgcagcaatttgttttgaggataagccgctggcgacttctgccaaaacagcgagttcgcggtcagtaaggggattgctttcagcggtcaccatattcgtgactaattccggggcataaaccgtttggcccgtcatcacttttcgaataacatcaatcaaatcatcactggggctgtctttgagcagataaccattcacttgggcagcaatagcgcgttcaaagtaagctttctgcgcgaaggtcgttaaaataataatttttgttgctaactggctgccatgaatcttatcggcaacgtccaatccggttaacttgggcatctcaatatctagaacggcaacgtccggtttgagttgctgaatgtcctgccatgcttttgcaccattaccagcactgcctagtacgtgtagatcatcttccaagtctagtagctgggtgagggcggagtttaacatactttgatcttccgcgagatataaggtaatcattgtgatagctgctcctttggtaaagtgagtgaaacttgagtgccttggcggttgtgattaatcgtaaacgttccattaacctctttcatacgttgttgcatgccactaatgccgtttgatcctgtgcgcttataacttttggaatggccatcatcttgaatctcaaccagatagtcatttggattctgctcaaatatcatctctacctgatgcgcgtgagcgtggcggatgacattggtgatagcctcggaaatgaccgcactcagacgaatttgtacttttgtcggccattcagcggcctcactttcgccactggttagcagaacgacatttgcctcagcaagattcttgccttgcatcaacatcatttcgctgagggactgctggtgcagatcgttaacaatcgaacggactaactgtaagtcatctcgactagtttgtgcaatatcgtctaactcttgagcgacgcggtcaggcgccttcacgagcaacttttttgctaattcagttttaagcgtaatcatcgaaaagctctgaccgagcgtatcgtgcaagtctcgggcgattcgttcgcgttcaccgcgccggacaattgcttgaagtcgccgattggtttgacgtaattgccgttgatggataactgaccgggaaacagtataggcgatgataggcgaaacaagtggaaaaatcagattaaacatatcaggattattgatattgataatcccgggatgaagctgattaacgcgccataaacttacaaaaatgattaaataaaaagccgcggcaaaccaacggaaatattttcgtggaaaacgggctaagataaaagaaacttgccaaccagggtaaataatcatgtaattgttgagggcagaaatagagaaaatacctgcaatggcgagttcaagcgggatcgtaactggcagccaatgatcgacctcgttcactaagatatagacaattagaaacaggatacctaaacctatccaaagccaatcattgattgattttactggcacaaattctgacatgatgtacggcaaatagaccagccaaatatagctggtccattcgagatttcttaaccatgaacggagactatgcctcacccaaagccacgccctttcgttgttcgtgtttggtcatagcaacaactagcaaactgccaagcacaaaccagaccacaataccaactaaattagttaagtccactgtagcacgtgaagtgagttgatttaagagcttgtttacaaagtaggttggcatctgcttgccaataacttgtaccagtttggcagcatggtgattggccaccacaagccgctgataatcgccattggaaaggtgagcaggttactagcaagactgagcatttcttcgcgatggatatatgacaatgcgatgccaatcatgagcactggcagctgtccaatcaaaacgacaccaaggagttctagccattggtcggtaccaaggctcacattattgacaccaacagcaatactgcctaacacgatgactgagagtaaactcatcataagcatccaaaaggtgattgacacatagtagggcaaagtgccatgcggagatagtcttagaaaggttgtgaaccccttatcgcggtcacgctttaagatggatgcaatgctgaagaaagcattaatcaaaatgctatagacaatcatctgatccatataactgatattaaaatatttaatttcagttgcagatccgctgatcatcattttggtatagagcaaataaaatcctgcgggcattaagagtgagaagaaaataaacgaagaattgcggacgactaaccgcttgccgtcaaaggccagttgcgctaagagtgttttcatttttctgcctcctgtttagttaattgtaagaagatatcttcaagtgattcccgactgaggttgatttgatgcaaacgatcaagcattgggacgagtgatctaagcgtttgatcgccattgttgctatggatcgcaagtttggaaccgatactgtgaacctgatcaacagcagcgagtcctttaaagatggcgggttgcagatcggtttcaaaagtaatggtagcgcctaaatgctttttttgaagttgttggagtgagccgtcaaaagtgaaacgaccatcttgtaaaatcaacaaacgatcagcgacctgttgaatttcttcaagataatgactggtgatgataatcgttttcccttgttgccggagttgctcgattttgttccagaattctttgcgtgcagtggcgtccatgccgacagtcggttcatcaagaaagagcaaatcaggctgaccaattaaggcaacggcgaatgtaactcgacgtaactgaccaccggaaagactgccgagccgttgcgatttaagctgttgcagttgcagctcttcgagtaatgcagctggatcaagcgcatcaggcgtctcggcagcagcaagagccagaatatccccaaccgtgatgctaggaatgatcatgtcgccttgcagcattgaaccaagtcgccccttgatagcagttgtacctggttgttgatcaaaaaccttgacggtacctgttcctgatagtagtccgagcaagatattaagtaatgtggtctttccagcgccgttaacaccaattaagccgacaatttcacctggctgaaccgtcaaattaatatcttttaggactgctttatcaccgtagctaaattttaaatgttctgcttgaattactgtggtcatttcgtccacctccaccattgatactacgcggtgggtgggctagccagtagtcgcgaatgtcatgaatggtatgtgacaaatgtcatgatccctatgaaaaaagcctatctttgaatttaatcaagcccggtcaataaaaagcggctatctgaaagcttagtggggcttcgcaggtagtcgcttcagttgtagcgcactataacggtatatccgccccttgatgcaagcctttcttagtctgatcgaaacttttatcggacttaaaggccccaatgagctgccgcatgttcatgtcactgtcacggatttcaggcatggtaggccgcaaagtggtaccggaaaccgtgaggctgtattgactagcaagactggtaataggcgttttggactgatacatattgtagaaggcaacctgctcaccatcaatcagggcataaaacatatagtctgtctgattgactgaagggataaactcagagaacacgatgagtttgctgctagatcccgggacgagatgatagctgtaggtttcactagtactgtttgcgtagtcagcgacttcggattgttgtaagccgttgagggtccagtaagccgtgaagaacaaggccgcccggtcagcgtctgtcagacccgctagctcactggcaggtgcaaatggtgctgttttcatagcatcaatcgggtaggtggtgtcggtattttgcgtccatgaacttgaagtggccgattcattggtgatttcggacgaggcacttgcggtggaggcactgctgctagataccgtccttggtaggcgcgtttgtgaagccatctctgacgcgactggcaaccagttaaaggcaccagttaaagccagaaaaatggcaccgaccatcaaaatgccctggagactgatccggagttgatattgtcgtttcaataaatgcttcggcgtccaataaaggtccgttgcatcgctatcatggtcttgatccgctttttcaagtagctgaaataaccactgcgtcaggtaaaaccagatcatgcgactgatcaacgctaaggccataccaccaaaaagaaagatgttttgaatctcgttgtttgaggccgcgagcatttcggttagtcgaagtccgaatggtgacgtcatcaggtcagcggaaaatgcgtcttggtaatgcatgacaattgctgttacgaggccaattgccgcgagtatatccagaacaatggcaacgagtcgccagttgcgtttgctaggatgagatcggtagataccgcgcacatagacaattcgggcaccgcggacttggctaggaaacatcatcttgtgctgctcaagctgaatatccacgattcggttggtgttgagatgttgtaacgcgatcactactaagacggcaatcataaaaagactgagaataaaatagaaaatcatggggttctcctttgctgcatagcggcttaagcagatggcgatcactgtttttacagatgcggtgtaacgattaaaaaagttgttgacagacatcatgataattagatctaggaatagcttgtcgatcattttctagtccttggccttgatgtatactccaatgttattctgatgacacgaaaaaaggagattttcttatgaatattaggacatgtgcgcaacaatccggtgttagcaaagatacgttgaggttttatgaaaagattggcttgattgtgccatcaaggggtgaaaatcattatcgcgattataccccagatgatgtggttaagttgcagatcacgcgaaatttaaaagcggttgggttgtctttaaatgaaatcagcatgatattgcgaatgtatgatgcgccagtgacaaaggcttgtcgcgaagataccttggccattttgcaaagttatcgcgaagtctttaaacgccgggcgaagctggatcttgcccttagcaacatagcgtttgatatgaccactgccattaaaatgcaggcaggggatgatgcaatgatgacattatttaaaaagataggggcaattaatgattaaaacaattgcagatgggattcgttttctgttagaaattgcaacagttgtgtttttgatcatcgctgggttcaatagtagcgatcttgtggttaaactaactgtgggtgtgatagcgccggtgctcggcattcttttttggggtcggttcatggccccaatgtcgcttcacaggttgccaacaattggccgggtgataacggaaatactcatatttggggcaacgtcgttggcaacgtatttgctaacaacacataaagccgcattgatttatggcggcatagcattgatagatactttgattgagcatctaataccgtgagttgatttaatttaactggcagtaagtattttgtcttaacgcgtgcatacctgtgggtgaaacgctttgtattgcagagctcaaaacttaccatttatgacttcatcattcacgacctgtattgctactgtgcaggtcactcttcttgtataatgaatgcaagttagtcaaccaggtaacaagaagggaacgactcatcatggcagcaccattaactggtcctttgcgtaatctattgttagctagtcagctcggcttaagcgtgcaccatccgttggccggctggtttgtgctgacgattctttatcatgatgctcgtagtagcagtgagccaattactttgagttacttggctcgaacgtataacaacgaatatctggatgcggccactgatgaagacccgatcgctgacgatgttttgaaaaaagtgttggatgtccttgtggcccaagctgggttggtcgaggttaatccgcgtaaggtccgtgcccgaatgcgcagcggtcagtatcatattacgagcagcggtagcgaatatctgaaaatgatgcagaaggtgattgatgcagaaagtactatctctgctaacacgaaccggattcaggagtacgttgctttagttgaaaagcttagcgtgccagttcgttcgggcgccgatacgcaactctataatgattttaaaaatatgcttgatgcctacgatgatgtgatgaagggcattcacaaacttgaagacgaccttgacgaactggcaaatgatattgcctttaaccacggcagtcaggaagcaggacatttgcaaaagatgctgcgcgacaaggcaattcctgcttatcagctgatgttgcaacaggcagcgcggattcaaggattggcgaatgatccgacttttcccgaccagattgctcattctcagcaaggtagcgatgatctcgatgcggcgcacgctgttggtcagcaggatgttttagttgtccgattacaacgaacgaaaaaatgggcggccgcgcagttaacccgacttgccttgagtatgagcccgacttcctcggccattgatagcagtttggattcaatctatcttgtgtttaatacgttgctaggcatcgtgcatttattgagtcaggaactggaacatgccaagcgccaagtaattgatatcaaggcgttgtcgcgccaactagataccctgttatctcattaccagcagctggagattcccgcccgcgtgccgcgtcatttgccagttgatcgcgaggttgaagatgccagcgacttgctagatgcctcgaccatgggacctgtccgttatttagccaatgccgcggttaaaaagccggcgagcgaagcggacaatccgacagtgacggatgacgcgccgagtgaacaggcacaattagcagggttgcgtgagttccggcaacagttgatgattgatgacaatcacggacgagttgatcatgatctgaccctgaaaacagttagcgcccgtgatgagatcgtcaaattgtttgccgcgacctaccacgatgacttgactggatttgccccgtttggtcgggatgctcagacagtgcaatcaataacgaacataccaccattgcagttgcaggtcgccggtgaagattacgcggtgatgttgccgtgcggtttcagtttttcgtttgcctagggggattttatggctaacatgacgaatcttgatcgattgatcatcaatgaattgctcgatcacggggtattcacaacgacgccgttggcagccgcgacccaacaaagccgtgctgccatcgctgagcttaaaaagccgtctgtgcagcaacggatcggcaattattttaaaaatctgctcggtcttgcaccggacaattttcaggagaacttattgttgttggcgggcaccgctaagctgaattcagcgcaggtgcacgtacttttggcaacggtaaaaacggtgatcaatgagcctgaattgcaaggcaaagatgaggatcgcgcagttgcaacgcaaaaaattgtgcggcaggtgcacagtgaagtgacggagctggacgaacgcgaaatcttgcggttaatcgacagcttgtttgtgaagcggtttggcttgttcacgccggatcggttagaggaagaccaggagaacaccccagcggaaattgacgattattgggaggtcagtccggactttaacgagtttgcccaaaacttagtgaatcatttgggccaatccgcgcctgcaaacgacttgaatgagctgcaacaggtgaatcgagtgctgctggccgagcagtttatgagtccgaaaaccaacccgcaaacttggccattgctcgttgctcataaagaggagatcgctgaccaatggcgccaaggcggccggtttatcttagaagtcggtgaccactatgccttgttattggacaatcagcggcaaccgagtgtcgcaaaaccatatttggtggcgctgacagttgcccatgagttgggtgccggcgtgcaggcagatgagctgacaccgacaatcaaagcggcaactgaagccctttttcctgggttcaccatccaaccgagtcaggttaaagcggcactaattgagaacgatttgatgagtgatcaggacgattattgggtaccgacgccgattgtcgctcgctttttagttgaaacagatgaacagtcagaaggagaaacgtgattgtgacagcccaactagtgccaattagttatcatcttcgtaattttaataaatacgtcaagctggacatgacagccgccgaaaatggcaatctaaccttgattggcgaaaatgcgtgggcaagaccaccttggcgaactgcttttttccgatgttgattgatggcgcgatcaccacgccgtcatttaatccggctaaaaataccgagaaggtttcgcaaagtgccagcgttcgcaatagcagtcgcgatacgcggacatttgagtcgatgctgctgggttggggtcctggcgcgatgaaggtccgaaccgggtacagttacgttcattttcggtccgaccaacggcaagtcttgctgggtctgggagcgactagagtgcaggatgacccgcgccggccaacatggtggtttgtcgttattgttcccagtgcaactgcatcaatcacgctacacacaattgatgatgatggcaaaagccttaacaaggaggcattcaagaacgcaaatgcaccgcttggcgatcagttgcacgtgtttgaccgtcctgaagattaccgcgagtatgccgccacccacgtctatggtttcagtgatggcaaggttttgggacggctggccaatgcttatcgcttgcttgcttcaccgacgttaacctctggcaatgaaaagttcgcgcctattttagcggcactgaaagatgcgcaagaaggcattgacagcatggtcattcgccgtgtggctgacagccagcggcaagtgaaccaatatcgaggcttattaaaacggatcaaagaaggccaacgtcgcttgcaaagtatgaaaaatcggattttttggcataatctgaatcatattcaagaaatccaacttgatccttacagtcaacgatttgcccgtaatgcaacgaatcaggaaaagttgacccatactaagcaagaagttgttgcatatacagcgcaactggccgaccttaaaaaggctgcagacgagattgcggcaagtttagaagtattgcgcgaggccaaagctgaacaggaccaactggtgaagcgccgtgaacagtatgatcagcagattaagaatagtcaggctcaactcgatcaatatcgcggcactgagatcaaaataacgactttggagaaacaactgactgacttaacagcagcccaggcgaagttggcgcaccaacgagatgcccatgtacagaacaatctgacgccgcttaaagtacggcttttagcgcggacgagcgtgctcaatgacttttccagcgttatggctgatgacgattggtcggtgattgaagaccaattgagtcattacatgcatcagttaactgccgcgaaggttcagtatgatggtattgaggaaacgatcaatcgcctgagcgccgatgtcggcattactaaacagatgcagactaaaatgggcactgcgattgatgaccgcgtccaaggtttcggcagtaatcgggttcgtgaaggattgcaaaaggataacaccagcattcacgaggctggtgcggcgcaaatgaatacgcaataccaaccgttacgtgatcaacaggccgccattttggccaaacatcctgatctgaaagttatgttgcaagatgcgacaattttgccgcagttgaaagcaatccggaagcaactcaaaccattagtggcgaccttgagaaacttgctgacggaaattgctggcaacgaacgaacccaagcatcgctgcgagacagaatcgcggaactaaaaggcacaattgatcctgatttcgatgcagttaaacttgctaataccattgccaaactaaaggcagatcgcgccgctctgaaaattgaccctgagttaccacagcgtttggcagcggcaatcgccaagcaaaagaaattcacgcagcagcttcaggccgttgaatcggaaattaatcggcggcaagggatcatccaaacactaaccgtcacaatcgaaaccgactcagcacagttgcacctgctcgccactgacattgtgtcgaagttgaaaactttaagtccgtatcttcctgacgatgtgcatttagcgaaagttgacgagctattggcatttgcccacagcaatcgcagccggatccgcagcagcaacttttcggacattaccaatcaaattagccgcctcattcatagatcggatgggcacggtgaagatttgaatgccttggatgttttgtttgctgaccgcggtttcccggctgaagccagcgccatgcggcaacaacgttctgtttcagaaaacggcttgacgattgttgcttttgatatcaatgaagcgctgaaattgctatatgatgatcacgccgctgtcgaaaaggcgcttgctgaagaaaaaagcggcaatgacatggcctacacgacctttgttcaggcagacgtggcagcgattagtgcgcagtatcaagttatcgagacctacaatcaaattttggcagaaggcgccggtcaccagcacattaagctgaaagttgaactgacgccgatcaacggcattgccccagaagcaattcaagaagcctgcgacgcccaactgcaacaacgcccccacctcgaagccttagtgaaacagcgccttgatcaattggcgaacaacacggaaatttccaatgacgacgaagccttttttacgacggcggaggaactacttgatacccgcgagtggtctgacttcaaggtcttgattcgccgccgccaaagtgctgacgatgattttgaagtggttgatgacaaattcgttcaatccggtgggtccggcgctgaaaaggcgcaggccatggtcttgccattgctcatagttccaaaaatggtcctacaacgctccaatcgcgctgatgccccgcatttggtgatgtttgacgagtttgcggacaaactggatccagaaactgcgaagtcgtttgcgaaaacgattgtcaattttggcttcagttttatcgccaccatgccaagcggcgcgcaaaacaaactcttggccgatggggttgataacatcgtttgggatgtgatgggttccccgcaacaaggtgacgggaaattccaccttaatcgcgtccaacaaaactttatttggaaaaaggacgactaatcagagaatcgtggggtagtagaagtgagctcatatattgacgcctttgaaaaggccaccgggcagccggcaccgccggaagctggcaaactcgatcaacttttcaatcaaatcagacaagggaaaacgttgccgccacgcgggcagcaagccgttgcgatgggattaactgcgcacacgcttaatgacgcacgggaagacccagcactttttgcctattatcgctgggtcatgacccactgctttaaatcgggtcaggtcaacgaactgactgcccgactcatcggtatggcctttacctcggctaatatttttgacaccgacttgccccaaccgctgaccctcaatccctggcagctcacacctatgctcgactttccactgaaaaacaaacaagccgttgtcatcgaaaacaacggcgtctttgctttactacaccaagaacatcccgactggccgttaatcttacagtctggcaacgactttaacgaggtttatgtccaactcatccaacgacttgaggcgcgggggatgcgctacgtctacctcggtgatctcgacagcgccggcattcaaatggccgatcagtttgcaaggctgttgaagcaaacatcagccgaagaagtggcggcgttgcaacaaccaaccgatgttcgactttggttagctgatcttggcaaaatagacgttcgccgcaccaagcaacgcaaggtcgtctcgccggtctatcaagcagagatgacgacgattgcactttttgggaagtttattgagcaggaacagttgatgggggtttatgaggtgcgggttgctgagtggcttgagagaaaaaagtaaaacccaagacatgactgcgatttaaaagtccttgatctgtaggtgctactttttttacgagagctctattcggattcagaaggagaaaattacatgacggtcagttggtacttagaagattttaacgatgaatccaatgaacttaataacgatccggatattgatttttcgacctttaatcaacgtactcataatattcaactgaaagtaaaaggcggtaaaggattactgcggttcgttaatcagcaagtgtggggaacggagggtgtgagtgaaagcatgattttcaacggtcacaaaattgctgatgcctttaataagtatgcgtctcccaccgaagagtggatctacaagaattactatgtcgctgataaaattacttgtcaccagcgattatctgagtatcgtcatacaattcaagggagcagacctctacttaaacaaattttgatgagtttggtgaccttttttgatcttttgagagatggtatctatctatttactattcgagacctattgccagttaatggcaacggcgatttttttgccatccagcgaactggtttgattcatgatgatgccaccacagagtctccgatctatgacagtacgaattctggcactagctttccgctttatctggttccgacacagccgacatccatgcttaacttcaagcatatacagcaactggaaaaatctcaaacagtgggaatggggctcacttatgagttttatggatttacaaatctattgtttgatggtcatcatagagcagctgtggctttttctcaaaaagctgtctttccttgtgtttcaattgtgccgttaagttttgcaaatactgactctgcggatgatattaaatttactccgcttgaagattttccagaaggcgaatatgttggaaaatcgaaaatttcggattggcattttcttgattaccccacgacttatgagattgcgatgatcatagactatgtcgcgaaaagtgtcaaagcgcctgaagaggatcgtcctgtgacgattaagatgccaataagcaagggactctctgaagaaaaggttatttggattattcaaggcttgttttatacgaatgaagtagatgcatatgtacgactcgaaccattgattcgacgtttttatccgtttgagattatctatcggcgttattatagccttttagtgaattggttgccgcaaaaacatgtccagttgcttttaatgaactttctgattgacaatctctcaacagatgatgaactaaatcaatttgtggccatcgctctcgccaaaattgaagaatgaataaaaaatagagaattcacaaaatgactgtttatttgagacattcttgttttcttgatcttttacggagaactccgaattatctagaataaaagatgtgaactggcgatagcctaataatttaccttgctgattggattatttgctatatcattaaacccacttttgatgttttctctattttgaatgaagggtgcttaacccaataatgacacagtgttcctgcttttcatttttttaaatccattcgcgccgaatgtataggaaacatactgctgttattattgaggactcagccatcctgtctctgacagcaacggatcttcaaacagtttatcccagtcatgatgatcttaagccgtcttgtcctcaaaaatcatgtggtcaagcggcatgcgccccgcgtcaaagtcgcttgttagactgatttcagatgggaggtttaagattaactggaaagagtcgactcgccgatcgttcatgtgatgaccggcttcctttccatgtagaggctgtaccagctccataagaagacggagtatgattgagcggtattcttcgctttcaaattgatcctgcatccatggggtgagtcgttttcgacttcttatcgaaatagtcgattattcacgcattgcgagcgggtaacgctacccaacgatcactggcataagcaactgttcttttgggatttttcccgaccggatcaccgaactagagtggttagtgagcgcatgaggttttatatcaggcaactggttgttataatggtgactgctgaataactaattatcttgactagaaatcgtgaggaacaacaacttgattgaagaacaaactgttcaattagttcaacaaagtttaaccggcatcaccgatcgacagatcaataccgttttgcatttgatgcaagaaggcaacacggtaccgtttatcgcgcgttatcgtaaagaaatgacaggcagccttgatgaagtacagattcaggcaattgaggaagcttataaacgtgcgactgctttgcaagatcgtaaagcggccgtcattaaaagcatcgtcgagcaaggagcactgactgccaagctggaacagcagattcaagccagtaccaaactgcaagatgtggaagatatctatctaccatacaagcagaagcgccagaccaaggcgatggtggttaagtcgcgcggccttgaaccattcgccaaatggttgcttgcttttccaaacggatctcttgagcaggaagcccagaagtacgttgatccagccaaagaaattgccaccgtccaggatgttttagatggtgcccacgaaattttggcggagacttttagcgaaatggctccgattcgtaactgggtgcgcaattttaccatgcgcacaggaaccattagcgcgacagtcaaaacgaagggcaaagaactagacgaaaaaggcgtttatcagcaatactacgacttcgaggaaaccgtcaagaagatgtcctcaacgcgtacgttggcgatcaatcgtggggaaaaagagaaaattctgacggttaaagtcaaagtcgacactgatgctgtcctgcattacttccattttaaaattatcgacaatcggcccagtacggaagcaacggcgtttattgaggacgcttacgaagatgcatacaagcgatttgttgggccagcgattgagcgggaagtacggaatgcgttaacaactgatgcagaagagaaatccatcaaggttttcggccaaaatctgtacaacttgctgatgcaagcaccaatcaaaggcaaggtagtgttaggttttgaccctgcataccgcactggctgtaaattggccgtcgttgatgaaaatggtaagttcttggccaaggccgtgatttatccgcataaaccagcaccagaaaaaaagcgtcaggaagccgcaccagaactcattgcgctgcttgaaaagtatcaagtgacgatgatcgcgatcggtaatggcacagcgagtcgggaatccgagcaatttgttgccgaaacgttgaagcagatcaaacgtgatgttttttacgtgatcgtgaatgaagcaggggcatctgtttactctgcgagccaagaagcgcgtgatgaatttcccgacttgcatgtggaacaacgcagcgccatcagcattgcgcgccgcctacaagatccgctcgccgaactcgtcaaaattgatccagagtcggtcggagttggtcagtatcaacacgacttgccaagcaaagatctgtctaatgaagtcgatgtcgtggtcgaacgcgctgtgaaccaggtcggcgtgaacttgaacacagccagttaccaactgctgacgcacatttctggcctatccaaaaccatcgcaactaatatcgtgcactaccgcgatgaaaacggccgctacaacagccgtgcggagttgaaaaaggtgccacgtttgggaccgaaagcatttgagcaatcagtcgggttcctccgcattatcggcggtaaaaatccgttagacaacaccgacatccatcctgaaagttatccagtcgctaaaaaagttctggcggcagcaggtgtgacccccgctgatttaggcgatgcagcagcagtcgctaaaattcgcgaggtacccattgcgccattggtaagtgaaggggttggtgctgaaaccgcgaaagatatcatcaccagcctgcaaaatccaggccgagacctgcgtgacaacatggccgcgcctattctgcgacaagacgtcttgacaatggaagacttaaaagtggggatgaagctagaaggcaccgtccgcaatgtcgttgacttcggcgcattcgttgacatcggtgtgaaacacgatggtctcgtccatgtctccaagatggcgcgcaaatttgtgcgtgatccaaagaccgtggttgccattggtgacattgttgaggtttggattgagttggttgatttagcgcgcgaacggattcagttgacgatggtggatccggctgttagctaatgcgtagggagagtgactgttagttacaaaacctatttaaaaaagaggcgttgcttttgatgttggtttgaagccaaacatcaaaagcaatgcctctttttttggataccaatcagttaaagtaaagccacttggtcttattatctgggctgtgaccttcagggtgtttgtttaaggtcaagctagccagttcatcactgaaccaaggacattgctcgttgccgtgccatgtcatgttacttattgacctacctgtgtcgataacaagtacaagcttaaaattttgcaaacttggagatcaaaaaaactaggcggacgttatacgcagtcaaactggttttttaccataggcgcagcgtttctgcacgcaaactcttgcaccggagaacgcttggcaagtggttttcttgaactggagaaaagcttagttagattgtgcttcatgatcggcatcctctgtgaggcgaacaccaaacgtaccttttttgttaacttttgccgtatatgcgagatgataaacagtctcaccatgaagcatggcatcttgaatctttttgatctctgtttcagctgcctgccttgtttgataccagccaagttcaacgagacgggtagtccctagaaagccacgttggctactttcaccaattaatagaaaagaaggtgccgttttgctaggaatgccttccgcaacttgaaatcctgtgtaactgcccagccggtcattgatcaaggaagtaatcgtgatcgaggcgcttgaaacgttattagaggttatctgctgctttggttctttaccgagaagatcggcataagaaacgcctaaaatgtctcttaattttgcaattttatcaagatcaggttcagctagaccgttttcatactttgatatggcttgacgactgatgccgatggcttctgctaggtcattttgtgagagtcctttttgttttcgtaactgcgtaagtctttcgccaaacatttttctcgcctccttctatacttcaattatccgataaacatctatgccatacaagcaatcaatgggggcaggttgtcaactggcggttgcaaaagtgagcaaagagggattatttcaagaaaatgaggatcgaactttatgttctggcgaatttttggcaaattaaaaatccggcctaaagtttgttcgttatattagcaaaaaaacaaccaaccccgttaaggattggctgtgatcgtgaagtattaaagtttctggttatagtattcaacaaccagtgattcgtcaacttctggttcgagttcgccacgttctggtaaacgaacgagggaaccggtcttcttagtgtcgtcaaaggtaacgtaggccggacgggaaacggtgttctcgatggcttcattgacgatagcaaggttttgtgaacgttcgcgaagagcgatcacttggcccggctctacttcataagaagggatatcgacgcgcttgccatcaacggtgatgtgaccgtggttaacaagttgacgtgcttgcggacggctggaagccagacccaagcggaaaaccagattgtccaaacgggtttcgagcaggatcatgaagttatcaccatgggtaccttctttgatcttgccggcgcgcaggaacaagttctggaattggcgttcgtttaagccgtacatccaacgtaacttttgcttttcacgcaattgttggccgtattcagagatcttacgacggttgttggcaccatgatcaccaggtgcataaggacgacgagctaattctttaccagtgccggaaagggagaggccaagacgacggctctgcttccagcgaggaccagtataacgagacatatagatattcctccaagattttatttggagtaaaataacgaattgcggctttagcacacgggcagtcctgcaaaggttcacctttgcagccgcggttactactgtcaccggcttaacgccgaggcaggactggagccgaccatgccggccgctgctgcattattttacacgcgtgctagtataccgtgtttagcgcagcagtgtcaaggtgtgccgccaacgtctcaccaaacttagtgaggatggcttcgtcattttcactaaaccgatccagtgtcggcgagtcgatgtccatgatggcgaccacccgattgtcaactgtgatgggaacaacgatctcagcgttgctggcagagtcgcaagcgatgtggccagcaaattcgtgaacgtttggcacgcgcagcacagcgttttgggcgtaactggtgccaacgacaccgttgcctggctgaatgtgcatgcaggcgactttaccttggaatggcccgaggtcaagctggccagttttatcattataaaggtagaaacctgcccagttgaggtcagtcatcaagtcgtttagcaaagcgctggcattggcaagtaccgtaattgggttagtttcgccggttagcaagccgtctaattggtcaacaatgatgggatcaagggtcgtcatttaatcagtccttttagagaatttatgaaaagcgatgtgtaggccttttaactgaagcctttttttgcgatacttgtacttaggatattctcacattttgatgcttaacggcattttagccgcgaagctgtcaaaatgcaattgaaatgataataggtaaagcagagggtgtagggatgatctggttctttgttatcgtagtgatcatagttgtcgctgccggcggtgtctggtggctgcagcattattttcagactcgaatcaagaacttggacgcgcaagtcgaagcgatcgacgttggtgcgctgtcgagtcagattcgcagcatcgagcagttaaagttaactggcgatagtctggcaacgttcagcaagtgggaacgggcctttgatcagttgaatgatgacgacttggctgacctacagaagattctgcttgatctggaggaccaggccaagcgttttcgctttgatcatgcccagaaaattgctaaggtgctggaagcaaaaattgacacagcccgccaacaatatgacttgatcagccaagccttacaagacattcggcatgacgaggcggataatcgcagtaagatgttgcagctacgtgatgattatcaagtgtcgcgtaaaacgatcctcgccaaaagttttgtcttcggggatgcccagccggctttggagcagcagttgcaacaactggctgaactttttcaaaaaattgaccagattaataatgatggcgatcatcaagctgctaagagcgagattaagcagttaagcgatgagatggcggcattgcggcgtcaagttaaagaattgccaccgcttgtcaatgaacaggtgaacgaattcccggcgcagattaatgaaatcgagcatggctatcggcagttgacaacggctcattatgttttcactgatgatattccgggcatggtcgaggatgttaacgaaaagatggctgacgctaacaccgcgcttaagtcgcttgatgtggacgccacagaagcggctaacagcgaaattgaagctgagattgataagatgtacgcgattatggaaaaggaaatgcaggctagaaagcgcgtcgatgctgctgcgccagacctgcgccaatttattgatcacgccttgcgtcaaaatcgcgagttgcagacagaactggatcatttgaatcagagctacacgttgaatcacgatgaaatcaaaattgccaaagatttaaagacgcagcttgattcgatcaatgccaactatattaaggatacggatgcgattgaagctggtaaggccgtgtattctgatgtgattgagcggtttgatgccaccaaagatgagttgacagcgattgagaagcagcaggttcaaattaatcaagcggtcgcaggcttaaagaaaggcgagattgtcgccaacaagcaggcagagaattttgaactggatatgcgtaacatcaaacacgaaattttacggcatcacctacctggtctgccacaagattatgtgagccaggtcaagcacgtcactgccgagatcgagcaattaaaccatgatcttgatcaagtgaaaattaacatggatgcgattgctaagtttctgattaaaattgccagcgatattgatgcgttgaaaaaagctaccagcgctttgattgacgctgcgggtttgacagaagaactgatgcagtatgccaaccgctataaaacaacagtgaaaccagtcgccgaagcagtgcatcaggctactgagtcgtatatgcaatttgattataagcaagccgcggataccttagcgacggcattggagcaaaccgaagccggaagctataagaaggttgaggatgcgtaccttgcgcggaagaaagcttcattatattagtgattcggatttgggaaaaccagccggtggtggctggttttttgtttggaggttgttgttgtgcgaatttgtgggtaattttcgtaggacttgttgtacgaactttctgatgtgatctaggctccgataaacgcgctcgccagtccagaaacctgcgtgtaaggaccttggtcgcaatggtcaaagtgcgaccatcacgcccaaggctacttacactccggtttctcccggagtggctcgcgctcttgaaacttactaactttttgtctataattcaacgcagtcacaataacggaaggggccggcagatgatttattttgataatagtgcgacgacgaagatttcgccggaagcattggctacttataataaagtcagcacggatttttttggtaatccgagtagcttgcatgcattaggtacgcgggcgaatgaggttctgcaaagttcacgggcacagattgctcagctgatcggtgcgaaaccaaacgaaatttacttcaccagtggtggtaccgaaagcgataattgggtgatcaagggaacggcgatggcgaaacgtgaattcggccggcacctgatcacaaccagcattgagcatcctgcggtcattaatacgatgaagcaactagaaaaattgggctttgacgtgacgtatctgccggtcgatcatcgcgggtttatcaacatcgatgatctcaaagcagcgattcgcaaagatacgattttggtctcgattatggcggtcaacaatgaaattggcagtatgcagccgattgttgaagctgcacgcgtgctggatgcctatcccaatattcattttcatgttgatgctgtgcaggcagtcggcaaggggctggatgctgccttgcaagatccacggattgattttatgagcttttcggggcataagttccatgctccgcgtggcacagggttcatctatgccaaagaaggccggatgatcgcgccattgctgacaggcggtggccaggaaaatgactggcgctcaggtacggaaaatgtgccagcaattgccgcaatggcgaagtcactacggctccttttggccaatgaagcggataacgtggctcgtcagcaagctgttcgcaaacgaatttacgatcatgtcagtcaaaagccaaaggtgacgatgttcagccaattgacccctgattttgccccgcatgtgttgtgtttcgcgattgccggtgtccgtggcgaaaccattgtccatgccttcgaggcaaaagacatttacatttcgacaactagtgcctgctccagtaaaaaaggtacggaaagcagtacactcgcggcaatgcataccgattcccggattgcaacgtcagcgattcgtgttagcttagatgaagcgaatactttggccgaggcagatgcttttaacaaggcatttgatacgatttatacgaagtttgctaaacttgataaggcgaccgtttaactgaaaggattatagtatgcaatattcagaaattatggttcgttatggcgaactttcgacaaaaggcaagaaccgtcaagcctttatcggccggttaaacggcaatgtcacccgtgccttgcacgaattccccaatcttacgattcgtcctaagcgtgatcggatgcatatcgaattgaatggggagccgagtgatcaggtgatggctcggttatcacaagtttttggcattcaaaatttttcaccaagtattgcggttgaaaaagatatggataaggtacatgcagttgccttgcaattaatgaacgaaaccgctccaaagggcattagctacaaggtcaacacgcgccgcagtgaccacgattttgccttagatacaaacgccatgaatttggatctgggtgactatctgacagataagcggcctgatttggttgttaaaatgcatcagcccgacatgattctgcgggttgaagtccggcgcgaggcgatttatttgtccacgaagaccattcaaggggcaggtgggttgccagtcgggactgccggcaaagcagctttgatgctaagtggcggcattgattcgccagtagctggctattacgcgctaaagcggggtgtggacattgagatggttcactttttcagcccgccgtacaccagccagcaggcactcaacaaagctaaacagctgaccgcaaagttgacgccatatgtcggccggatttactttatcgaagtgccatttacggaaattcaagaggaaatcaaggcgaaagtgccagaaggttatctcatgaccgttcaacggcgattgatgttgcggctaacggaagccattgctcagcagcgtggcgatctcgcgattttcaatggcgaatcggtcggtcaagttgcctcgcaaacgttggagtcgatggcggcaatcaatgatgtgacaacgatgccgattattcgaccagtggcaacgatggataagaatgaaatcattgccgaagccgagaaaattgacacttatgatttgtcgatcatgccatttgaagattgctgcacgatttttgcgccgccttcaccgaaaactaagccaaagacggatcgcgcgcgttactatgaaagcaaaattgatgtcgccggcttgatggatcgcgcactggctggcgtgaagattcaggagatcaagtcatcggatcaatttatgaatcaagatcaagatgttattgctgaattactttaaaaagaatgcctgttgtttgcctattgatgatagtggtcatggcaaacaacgggcgtttttatttaataaaggaaacatttcacaaaagctgagacttttgacggttttcatcttttggttatctgtggtgataaagtcagaagcacagaccaaacagcccggtcgctgacagataatatgataacatcagtacaatcctaacgattcatgccagtcattacttttgaaaaaagatagccaagcaagccgaattctggtaagctaatatgtgaaaagagtaacaaaagcgtgcggaggtgttcaaagtggtagtcagcaagcaggcgttatcacaggcaacaattaaacggattcccgtgtattatcgaacggttaaagacttgcagcagaccggcgagaaacgggtgcggtctgatcgattaagtaaattggtgcacattgccccagcaacgattcgacgtgatttttctaattttggcgatttaggccgaagtggctatggctattcggttgacttgcttgcacaggtttttggcgagttgcttgaagtccactcagaagaacagatggcgttggtgggttgtggtaatctgggccgtgccttgctgacgaataattttcgccgcaaccctgatctttctatcacgatgggctttgacaccgatccgcaattaatcgggacaacgattgccggcgtgccgatttatgatttggccgctttatctgaaaaattgcgtccgagtatgcacaccgctattgtctgcgtcccaagctcggcccaagctgcagtggtgcgccaattagaagcgcaaaacgtcactgcaattttgacctttgctcccaaaccggttcctgccaaaccgacaaccacgattcgctacattgatctcaccagtgaactgcaagccttattgtttgtcgatcatcaaaagcaggttaaacgagtgtcgcaagggtagcacaactgagccgtagcaggctatgtttccgaaaaggatagcgctagcgattgacccgtcaaaatcaacgggttataattcagctaatgcaatgatcaagagggtcatggtctttttttccagcgacaaggtggttggtgcaaaccttgaaaaaggctatggttgtagcttgtgagctgccgtcctgaagtgagtagggagcggccggtgacagccgttatcctgaaccaagtgggggattgtttcccaatttaggtggtaccgcgagctgactcgtcctaatttttttaattagggcggttttttttattctcgtaagtcagcttgcgggccgcgttactgcaggaacagaaaaaaattgtgaggtggagccaatgaaagagcaagcattagcacctaagtacgatcataaggccgttgaagctggccggtatcaagaatggctagatgaggatgttttcaaaccgagcggtgatcaaaaagccaagccatactcgattgtcatcccgccgccaaatgtgacgggtaagttgcacatgggccatgcatgggacacaacgctgcaggatattgtgattcgtgaaaagcggatgcaaggttttgatacgttgtggctgcccggaatggatcatgctggaatcgcgacccaagccaaagttgaagctaagttgcgtaaagagggcatcagccgctatgacctagggcgcgataaatttgttcaaaaagtttgggaatggaaagacgaatttgccaagacgattcacagtcagtgggcgaagatggggttgtcacttgattacagccgcgagcgtttcaccttggataagggacttaacgaggctgttcgtaaggtcttcgttgagttgtataagcaaggcctgatttatcggggcgaatatatcgtcaactgggatccgcaggcccgtacggcgttgtcggatatcgaagtcattcatgaagatgataaaggcgccttctaccatgtgaaatatccattcgcagacgggagcggttatattgagatcgccacaacccgtcccgaaacgatgatgggcgataccgccgttgctgtccatcctggtgacaaacgctatcaggacttagttggcaaggagctgattttgccgctggctaatcgcaagattccaatcatcgaggatgcgtatgttgatccagcatttgggacaggggcggttaaaatcacgcctgcacatgaccctaatgactttcaggtaggaaatcgccatgacttgaagcggatcaacacgatgaatgaagatggcacgatgaacgaaaatgctggcaagtacaatggcatggatcgttttgaagctcggaaggccatggtggcggatctggataaggaaggtctgttactgaaagttgagccaattgtgcatagtgttggtcatagtgaacgcaccggtgttcaggtcgaagctcggctgtcaactcaatggtttgtgaaaatgaagccgttagcggacgctgccatcaaagcacaacaggaagctgataaaaaagtgaccttcgtgccagatcggtttgagcacacctatttgcaatggatggaaaatattcacgattgggttatttctcggcaactttggtggggtcatcaaattccggcttggtacaacaagcagactggcgagacctatgtgggcatggaagcaccaaaagacattgaaaattggcagcaagatccagatgttttggatacttggttctcaagtgctttgtggccattttcaacgatgggctggccggataccgattcaccagattacaaacgctactatccaacggacacattggttaccggctacgatattattccattctgggtggctcgaatgattttccaagggctgcatttcactggcgagcgtccgttcaagtacaccttgattcatggcctgatgcgagacgaacaaggccgcaagatgagtaaatccttgggcaatgggattgacccgatggatgtgatcgaaaaatacggggccgatgctttgcgctggttcttgattacagggaataagcctggtcaggatactcgctttagttacaaacaagttgaagccgcttggaacttcattaacaaaatctggaacatctcccgattcgtgatgatgaatctcggggacttggagaagccgcaacaaccagatccaagcaccttcgatttatctgataagtggttatttgcccaattgaacgaaacgattaagcaggtcactgatctatctgaacgcttcgaattcggcgaaatgggtcggactctttataactttacttggaacgtttttgctgactggtatgttgaaatgagtaaagaagtgctttatggcgatgacgaaaaagcgaaagcagctaagcgagttaaccttgcttatgcgcttgaccagattctgcgcctgttgcacccagtcatgccgtttgtgactgaaaagttatggcttgctttgccacacgcaggacagtcaattgtaacagccagttatccagttgctaatgatgcttttgaaaattcggccgctgttgatgccatggattcaatcatcgctttgattcgtggcgtccgtagcattcgtaaggatgcaggtgcgccactcaagacgaaggttgacattattgtcaaattaactgacccggctttgaagccaatttttgaggacaattttgactttattgatcggtttgttaacagcaaagctttcacagtaggaaccgatgttgccgagcccaaaatggctggcagcaccgtgatcacgggagcaacaatcttcgtaccgttaaatgaactggtggatcttgatgaagagcgggctaagttgacaaaggacgctaagaagcttcagcaagaaatcgatcgcatcgataaaaagctgaacaatcaaggcttcctcgccaaggcacctgaggcagttgttgaagaacaacggaccaagcgcagcaattttgccgatcagctgaacagcacacagcagcggttggcacagttgcagcaggcttaatcaagtttcgctttaaagtaacgatcagattgacgttggtttgcttttggttaatagattgattgaaaaggggactgaccatggtaacatggccagtcttttttgtttacctacaggtggttgaccgtttaaacccttttggcacaaggttacgtctagttatcattcaaaaatcactgggtaaacatcataacttctccagaatttctggtatcatgaaacttatgaagctagcacttgcacgctggcatagaaaccgggcgcgttcatgccctgaggaaagaagttaaccatggactacaccgaaagtgtcgcgtatattcattcgtttccgcgcttggccaaaactggcgatcatcagcgcattctcaccttgctgcatgccttgggtgacccgcaaaaacgaggccattatattcatgtcactgggacaaatggtaaaggctcagccgccaatgccattgcccatatccttgaagcaagcggtttgagtgtcggtttgtatacatcaccgttcattatgcggtttaatgagcgcatgatgattgatcatcagcccattcctgatgctgagcttgttaaagcggtcgctgtcggacaacaggccttaacccagctgcggcaagcgacaccagatttcggggtcacggaattcgaatttatcacggctctggccttttggtattttgatcaaaaacaggtggatttggcagtgattgaggtggggattggtggcgacacggattccaccaatgtgatcacgccggttgtaagtgtgctgactgaggtagctttagatcatcaaaaactgcttggcgatacgattactgagattgccacgcataaagctggcatcattaaaccgcacgtcccggttgtgactggcaatttggtaccagatgctgatgctgttgtggcggcaaaggttgcagcaacagctagcacgtggttgcgatttgaccgcgacttttccgttcctaaagcgcgcttgcatggctggggtcagcgattgacttatgccgacaaggatggtgagctgacagacatagatataccgctggttggtgattaccaacagcgaaatatggcaattgcgattcagacggcaaaagtctatgcctctgcaacgaattggccgttgaagtcgcaggaaattcgccaagggctagcggccagtcgatggccggcgcgattagagaagttaagtgacgaaccactgattgtgattgacggcgcccataatccggacggcatcaagggattaattgccgcattgcaccagctctttaagcaaccggtgacagtgattgctggcattttggctgacaaggattatcacaccatggccgatgcactaacgaaggcatttcataccgtgtatctcgtaccggtaccaggcaatgcccgggctttgcctgaggctgggtatgcagccttgcatgaaggccaattaaaggattcctggcaagaagcaatggccgcgagccttgttgacgatccggatcagccaatcatcttaaccggctcgctttatctggccgctgatgttcgacaaactttaagagcgtgagccaacccgggtagaaaccggagtgtaagcggccttgaagtctaaatggctgatccttggccatttagacttcaaggtccttatgtgcaggtttctgcgcctgcgaacgcgtttcagaagagcctagaccagctcaattagaacagcgcgtgagcagtttttttgtgtcacgagcgactttaaggaggagaccatgacgactaccattatttttgatcttgatggcaccttggtgaacaccgaggcactttatctcaaaagcaatgtcaaagctgccgctcaactgggattgcatcgcactgaggctgattttcggccgttagtgggtgcagccggccccagcgaggccaaagtgattgccgacatgattggcgccgaacatgctgcttggtttcaaaagttttcgacggcggatgttcttgatcaaattcaaggcggcgcagattttgttttgccaaatgtacagccaactttagcggcattgacaacggcaggttatccattggcgctggcgacgagtagtccgcggcattatgtggatgttgtcttggcagcaaccggctggcagtggcagtttcacccgattttgactggcagcgatgtacaggcgcataagcctgatcctgagatgtacgaagcaatgaaagtcaagctgggaaatgtgccagctgttgtcgttgaagatacccatgttggtgttgaagcggctgttggagctggcctgccagcggtcatgattcctggtattgcgcaaaaacccgattcaaaagcgaccgcgattctgtcatcaatcagcgaattaccagcttggttgaaaaatcagcctgcgtttgcgtaattttctaatgacaccgataactgatcggtgaagtgagaaaatgccaacagggggaattttcatggcagatgcagcagaattgccacgtgaacggttattagcacatggtccgcaggctttgacggatgctgagcttttgcagctggtggtgcgagcagggaatcaacattatccggttaagcagatcgtgagtgaagttttggcgacttatccgaaacttcagggcttggcagagggggatcaagggttgcttgagcatattcggggactgggcgctgccaaacgggctagtattttagctggggtggagttggggcggcgggctatgcaacggcagacggttcgctacgggcaaatcaaaaatagcgaacagttaggcaaaacgatgatttctcggtttgctggtgtgaatcaggaatccatgttgattttatttttagatgttaagaatcagattattactgaacagattgctgcaattggtacagtagattcagctatggcagatccgcgtattgtttttagagaagcgttaaagttgagcgccacaaacctgattatggtacacaatcatcccagtggtgatccctcgccaagtcaggcggatcgggacaccacgactcggtttcagttggccgccgcgttgcttggcatgcatttgattgaccatctcattgttggtggggaacgctattattcattcgcgcgcgatgatccggagttcaattaggcaggggaacaaagttgtaagcttttctcaaattgcccatctggcatgaaaatcgggtagtttcacattttgtcacagaaataaatatgctataatgcatggagttatacgaaatgagtcagcataaggggagaacgtcttgtttggatttggatcaaaaaatatcgggatcgatcttggcactgcaaataccttggtttacgttgacggtaaaggcatcgttttaaacgaaccttccgttgtcgcgaagaatacccaaacggaagaagtcattgcggttggtgaagaagctcgcgacatgatcggtcgtaccccgaccaatatcgtggcgatccgcccaatgaaagatggggtcatcgctgactacgatacaacggcagccatgttgaaatacttcatgcaaaaggcgctcggcaacggtagccatccgcaggtcatgatttgtgtgcctagcggtgtgaccgaagttgaaaaacgcgccgtgattgatgcggctaaagttgctggtgcacgcgatgcattcgtcattgaggaaccttatgctgctgcgatcggtgctggcttgccagttatggatcctaccggcagcatggttgttgatattggcggcggcacgactgacgtggcgaccatctcacttggcggtatcgtgtccagtcgttctattcgagtggccggtgacaagtttgatgaagcgatcatcaatcacttacggcagaatttcaacctgttaatcggtgagcgaacagctgaagccatgaagattcagattggctcagcatctgttgaaaaggcaaaagatattgacggcatgacggttcgcggtcgtgatttgttgagtggtttaccgaagacaatcgaaatttcagcgactgacattgccagtgccattcatgaaaatgttcttgatatcattacagcaattaaagagacgcttgaagaaacttctccagaaattgctgccgatgtcattgatcatgggattgttttaacaggtggcggtgccttattgaagcacttgccggatgtcatttcggatgaaaccaaggtaccggtcttcattgcccaagatccattggattgtgttgccatcggtactggcgagtcattgaagaatattgatgtcctaaagaagcgttaacagcccataaatgaagatggttcgtgtgtggcaagaggctgggatgatttgatcctggccttttttcgcgagtatgacggaggaaccaatgcagaaattcttttccaataaaaaattgatcgccctcatgatcgcgttgctggtcagtcttggtttgatcgcagggtcgatgtatgcgagtaataatcgtaacaccccgccatttattcaacggattgccaacgatgtcgtgggcattggcggtcgcttggttgccattcctggggattttgctcggaatggcttggatgacatcaacaatcttttggatacctttcaggagaatcaacggctaaaaagtcagctggataatttagctcagacgaaggttcaggtgcagacacttaagcgggaaaacaagcagctgaaaactcagttgaagttaaacggcaccttgaccgattattctcaaattagtgccgcggtgattttacggacaccaagtgactggcgcaacatggttgtgattaatcaaggcagcgctgctggtgtcaagaaaggtatgccggttatggccggttcgggactgattggtcgagttgttgaagtcaatcggacgaacgccaaggttgagatgttgtcgacggctaacaagtctagtgatcgcatcgccgccgctgttgaaactaagggcgataaagaagtgaacgggatcattactggttacgacgagaagtccggtgatctcattttgggtgagctgaatactgatactgatattaaaaaaggcgacgatgttgtcaccagcgggttaggcggtatgaccccgaaaggcttactcatcgggaaagttgccagcgtcaaaaaagatgactatggtttggccaacagtgtttacttaacgcctgccgccagtctgaatgatgttactgtggtgactgtcatttcgcgcacgattgcaggtgactaagatgctgaatgaaaaatactttactggtcattggtggattgttctcctgttgttgctgctgatgttgattgatggtagtctggcatcggtattagcccaatggattatgcgcccgaactttatgggcacgccgcagctgacattacttggactcattatgatcacgttatttgtccctgaggaaaagtatattacttggattgctgcgatcattggactcttgtttgatacgttttatactggcattttaggggtcaatgcactgctctttccattagttatttataccattcgacagattcggccgtatattccgcgaacaccggtgtttgtcggtatggtttatattattgggttattactgtatggcattgcgaactacatcatgaatcggttcatcggtttcggtactggaaatgtcgtgatgcttattgcaaaccacctcggccctggtctgacagtcaacttggcgttgtttgtcattgtatatgggccgttgcaccgtttgttagacaatttagctgaagaatagttggggtgatgatgtggacagtgtcgtcttaaaaggtcgtaacgatggtctggcgctgcagcttcaagatacagcagattttgagcagatcatgcgcacactgaaaacattactaggcaaactttacgaagaaacgccaactggtgatgtcagttaccgacttgaaaccggaaaccgtttgctgaccgaggagcaattagccgatattcaaaagatttttgctgattttccgcgtttttcaattaatggggttgtcagtgcggtgatcgacaaaacggttgttaacgaaatgattgcagccaaaacaacccatcgcatcggcggcgttattcgttctggtcaaaccatcgatttgatgggcgacgtgctttttctcggcgaccttcattctggtgctaccttgtgtgcttctggtaatatctttgtgatgggtcaggttggcggcgtggttcaagccggcagtcaaggcgacgctcgtgccgttgttgtcggtgatttgaaaggtgcggggcagattcgaattgctgatgtcgtggagattgtggcagatcattacgatcctgaccgaccagtggcttatctgaatgagttacatacgatgacacatgcgggattagcggatctggccagcattcgaccgcgattattcaagcaaatggaggcaatgtagatgggtactgcgttagttgtcacatcaggaaaaggcggcgtcggcaaaacgacatcgtctgctaatatcgggacagctttggctctgcaagggaaaagggtcgttttgttggaccttgatattggtttgcgaaatctggacgtcgtgatgggtttgtcaaaccgaatcatctatgacattgtcgatgtggcaaccggtcgcgctaaactacatcaggctttgatcaaggacaaacggtttgatgacttgttgtacttactgccggctgcgcaaaacgcggaaaaagatgctttggagccagaacaggttgttgaaatcgttgagcaattacggcctgattttgactttatcattcttgattcaccagccggtattgaacaagggtttagaaatgcaactggggctgctgatggtgcgattgtggtgacgacaccagaaatttctgccgtcagtgatgcagatcgtgttgttggtttgcttgaacaacgtgaaatgccaataaaaccgcgcttggtcattaatcgcattcgccaaaacatgttagccgatgggcgctccatggatattgatgaaattacgagtcatctgggactcgatctgctcgggattatcgtggacgatgatggtgtgatcgcaagctcgaataagggtgaggcgattgtgatgaatccagacgatcttgccagcaagggttatcgtaacattgctcgccggctgttaggcgacagcgttccattgatggatattcggataaaaaagcagggcttttggtcaaaactgttccatcgtcacgactgaaatacgtgctggcgtgacagcaaatcggtgaaacttttcagaaactagttgacattgattaagattcggtgtaatttagtgacaattcattaaagcgttgagtggaatcgatgaatggtcgtgtcttgaagcgagtccgggatgatgggaaccagatagacatccattgatcacacatccacgagtggacgattgaacgaagtaggtcgtctcggttgggctcgttatcgccgtggttgagataactacatgaggttagctgtgcgagcagttaacaaatctgaggtggaaccgcggtaaaagccgtcctcttacagcaatttgctgtaggaggacggctttttgtttaccggacatctttcttggacatgatttttcaaccatgtgaggctgattgtgtgaacaatcagcaaactgaggtggtaccacgcaaaagcgtcctcttgcagcagcatgcaagggggcgcttttttgacgagttggcgcgaacagtcccagctatgcgaacgccatcagtcacactgacacagcgctgaaacgaatattattaggcttgaatacgaaaagggcgtgaactggtgcgattagaaacccgagcgtaagcgaccaaggtccttatcagcaggggttttgcaccagtgaacgcatttagaggaggaaacaccatgagctatatttttcagattttaccggcattattatctggtgtgaaaatgacgttgggtatttttgctatcacactgattggatccattccgttaggcttgattctatcggttgggttgatcccaaagccaaaatcgatactgggtaaagcagggaaagggctgcttgaaggttatgtgtgggttttccgcggcacgccattactgctgcagttaatgtttatcttttacggactcccgattattggattggtatttgatcgattctccgccgcactggtcgccttcattttaaattatgccgcctattttgccgaaattttccgtggcggcttcggggcaattgatgaaggccaattcgaagccagcaccgtcttgaacatgacgcgttggcaggcgctgcggtacgttgtgattcctcaagtggtcaaaattgttttaccgtcaattggtaatgaagtcatcaacttggtgaaggattccagcttggtgtacgtcattggcttgggtgacttgctgcgagcaggtaatatcgccagtgctcgtgatgtcaccttggtgccactggtacttgtggggatcatttatctgttgttgacactgatcctgacatttttacaaaaacggatcgaaaatgcattttcatattatcgctaggaggggcaacctatgttagaactcaaacaaattaataaatcatttaatggccagccagtcctggtggatatcaatgtgacgattgaagatggcaaaacgttagccattgttggaccaagcggtgctgggaagacaacattgttgcgaatcattagtggactagaaactgcagattccgggacgatgatctggaacggtcagccaacgacagcgcaagcattacgcaaagaaggcgtcattggcgttgtattccaaaacttcgaactttttccgaacttatccgttatgcgcaacatcacgcttgcaccaaccttgcaaggcgttgatcagaagaaagctgatgaaacggccaggaagttgctagatcggcttgaattagtcgctcaggaaaatgcctatccgtattcattgtcaggcggtcaaaagcagcgggtagctattgctcgggcgttggcactgaatccgcagatcttgctttacgatgaacccaccagtgcgcttgatccacttttgcgggaaaatgtggctgccttggttaaccaattcaaagcttctggcatgacgcaggttgtcgtcacgcatgacatggactttgccgaaagcgtggctgacacgacttatcacgttggcaaaggcggtgacggtcaatgaaacgccgaatcgtactggcactcatgttactcgtcacattgctaggcaccgtcattagcggatgtgcgcgcgaaaccgtcggcaattcctggccacggatcgaacgaaccaaaaaagtcgtcatcggtttggatgacacctttgttccaatgggattccgtcaaaagaacggtcaactggctggctatgacattgatctggcaaaagcggtattcaaacgctatgggattaatgtcgattttcaaacgattgattggtcaatgaaggaaactgaactgaaaaatcaaacaattgatttgatctggaatggttattcggtgacaccggaacgaaaagagaaggtggctttctctgataattatttgattaatcaccaaattttagtcaccaagaccaaaagtaatatcaaaacgatcaaagatatggctgggaaaaccttgggtgtccaaactgggtcaagtggcgcctttgatctcgatgcccagccaaaattgctgaagaatttcattgcaaacaaaacaccaattctgtatgacacctttaacgatgctttcattgatctcgatgcaggacgcattcaaggaattttaatggatgaagtctacgctcgctattacattgcccacaaaccggacccgtccagctatcgcattgccagcgacgactttccacctgaaaactttgcggttggcatgcgcaagtcagacaatgtcttacgcagcaagattaatgccggtttgaaagcacttaaagctgacggcaccgtagcaaagttgcagaaaaaatggtttggcaaagtcggggagtaatcagcgtatttgcgaagaaaaaatgaggttgtgccgctggcaattgtcagggcatgaccttttttcgtcaagaggcacctaaaaagggaacttcgagaccacttgggtgagtatggaaatggattttttaaaggcatagctgggctaattaggttatgatacttaagtaaccttcgccaatgaaaccacttgtaggctcaaaatttgctggcagttacggggggaaaatgttatgtggatctggttggtccttgggtttctttacatcatcaacgtactgacagcgatcatcacggtctttcgttcgcatcgtgatatttctgcagtttgggcatggctattggtgcttttactgttgccggtggtcggcttcttgatctattttgtttttggccgcaagttacgggctaatcgcatgcaggatctgatgacgcagcgtttgctgggcatcgacgatttagttgatcagcagcagcaagccctggcagctggccaaccgttgattggaacgcctggcagtggcggtgtttccgaactagtccgaaccttattgcgtgctgatgacgcgctagtaaccacccacaatgatgtgcaagtcttagcattgcgtgaagccttttttaagcaattgttcgaagatattgctgtggcaacggaacatattcacatcgaagcttatactattcggcctgatgcaattggccaccagttgcgcgacttgttaattgaaaaagcccacgccggtgtcaccgtacgcgtgctttacgatacatttggctcccacgacctaccaaacaatttttggaaaaaattaacggcagctggcggtcaggttgagcggtttgtcgctacgaaactggggcgttggaatccgcgaatcaactttcgtaatcatcgtaagctgatcattattgacggacagcttgcctatctgggcggttttaacctcggcaaggaacaccacggattgccaatgttgcgtgatactcagttacgaattcagggcaaggcggtcgccgtggcccaggcgcgctttttgatggactggaacggaacgagcaagcaacaaaaagtaaaaaatgttgatgtcctgtttagagaaccggttgtcactgggaacacgacgatgcaaattgtctctggcggaccagagcagcaggttgaagcaatcaaactaggctatcttggcctcattaatcaggcaaaaagaagtatttggatcgaatcgccatatttcgtcccagatgacagtttgctggatgcgctaaccattgcggcgaatgccggcgtggatgttcgagtgatgattccgaaaaaagccaatcagatcttgatggccaaggcttcgctattttatcttaatcaggttgtggcaaatggtggacaggcatttttatatgaagaaggttttttacatgctaaaacgattgtggttgacggcaaatacgtttcaactggcactgccaacttcgatatccgttcgtttaaactgaactttgaaattgcggcatttatttacgaccatcggattgggaagactttccaaaagctgttcttagcggacatggaacgggcaatgccttacacgcaaaaagtgatcaaagcaaaaacgcggcctaagcaactcagtgaagaactctcccgcttactagcaccaattctgtaatcgccgcgccatgaagctgagttgaaaaagggcagataaaaagccgctggcacacagcggctttaagtataaggtgagatcggtttagatcaattgtaaacttgctagggcacccagaacaacgcctaaaacggtaatgatgatcatgacccaggcgctgatgatggtcatcttctggaacttgctttttttctttttctgcaccgaaaacaccacctttgttgttctgctggctatcattgtactggtttttgccggtatcggcaagataatcgctgcttttttgtggccttttctagcgactaggtcgggaggcagtattaattgtggtcaagtattgaggcaatatcgggggcttcattctttaaaagcctaatagacgagcaacagggtgttattcaattttttgttaaattttttcaaaaaagcaggcaactttaccacgcaattattttgcaaagcttgacgctccacggagctttggttagggttaattgagagatgtatcaatacgcggcaccgaagacggttgctgcttttggagggaatcatcatggtgttgcttgcgatgggtttgcccattctggtatggctggtcgtcgttgcggctgtcgttcaattcgattttcatggcggttcgtggttttgtttactcgcaatcgttaatttttgggctatttttaaactaacctttaccaagacaccaaattttatttgggtcattttgtttaccacgatggtgattgccttgattttggtcatttggcaggtggtacgtgaatatgatctgatcgttcgtcgatattggcgcatgttgacccgtgttttagccttagccaccacatgttggtggatggcgggtgttttaatcttttttctgggttaattccccacttttctcccacaactcattatcgcccgtgatccttgtgatcacgggctttttttgtgctcttcaaaatgattagcttattaaataacccaattttcattcataagtggttacatgtggagaagagtgggtcattgtggtagactgaaaaaagtagggaggtgtcaaccatgctcatgggtgaatttgaacgcagtattgatgcaaaagggcgtttaattattccagctaagtttcgcgatcagctgggcgcctcttttgtgctcacccgtgggatggatggctgccttttcggttatccgattgctgaatgggacaaactccagaccaaacttgcaactttaccattggcaaaaaaagatgctcgaacctttacccgatttcttttttctgccgcaacggaatgtgatatcgacaagcagggacgaatcaacatcccaaaaccgttgttcaaacatgctggtttgcaaaaagattgcgtactagtcggcgtgaacacgcgtatcgaagtttgggatgccgaacggtgggaacagtttgctgaaaccgctgaagaaaactttgatgatatttctgaaaatctaacggactttgggttatagcgatgacagaatttaaacatgaaacagttctattaaaagaagcgacggcggcattggcggttaaacctgctggtacttacgttgatgcaacgttaggccgcggtggccatactcgacagattctcaatcgcctgacaactggtcgattaattgcgtttgatcaagatgaggcggcgattgcaacggtcacagccgattttggaacattgccaaaacaactcactttggtacatagaaattttcgagatttgaccgatgcattaacgacgctgggaataactgaagttgatggcattttatacgatctcggcgtttcgtcaccacaatttgatgattcaaagcgcggcttttcctatcgctttgacgcgccactcgatatgcgcatggaccagcgtcaaacgctcgatgcaaaaacaattgtcaatgaatggccttatgccgatttggttcgcatcttttcccgatatggcgaggaacatttttctaaacaaatcgctcgacgcattgagcaagcacgaacagtccagccgattacaacgaccttccaattggttgagttgattaaagcaggcattccagcaaaggctcggcgaacaggcggtcatccagctaaaaaagtttttcaggcaattcggatcgcggttaatgatgagctatcagcgcttgagtcgtccttagaacaagcgttgaagttgatcaacgtcgggggacgcatcagcgttatcacgttccaatctttagaagatcgactcgtcaaaacgatgtttaaagaagtttcttcggttcaggatgtgccgcgtggcttgccggtcattccggcctctgcacaaccgaattatcgcctagtaaatcgaaaaccgattttaccaagtgaagaggagcttgcggtgaatcaccgcgctcatagtgccaaattgagagtcattgaaaaaattcacgattagggggtacaatctatgcttgagagtacagcaagaccattagtgcagcagccggaaacaccgccaatacataaacctgtcaccacacctgcgcccaacacacatattgcatttagcgggtttgaaaggacattgatgtttgcatgtggtgttttagcgaccgtggtttgtgtagtctgtttgtttatgcaaaatcggttgagcaatacacagcgtcagtatgaagatttgcagacgcagattgccaaacagtcccagacgactgcgaatctcaagcaggagattggtgaactttcaaattcagaacgccttgatgcctttgccaaagcacacgattttaaggttatcaacggcaacataaagcgtgttgataataaatgaaaattttcaaatcaaaacgatcaacgaatgcatatcctgcccgaaaccgtaaaattttcggcatctggatgatcggggtcacactcctgatccttggtgggttcgttcttcgtttttcttttgtggcgactgttggcgaggttgattctaacaatctggcgaagcagcgacaaaaacaatatcaaactgatactgtcttgcaggctaagcgcggcgccattctcgataaaactggcaatgtgatcgcagaagattccaatacttataccatttttgcgattttggacaagcaaagcaaagacagcaacaataaacctgattatgtggttgataaagcaaaaacggcgaagattctgagtcgttatttggcgatgtcagaagcaaaaattttggcgcgactaacgccaggtaaaaatatgtatcaggttgaatttggcacacctggcaccaaattgagtttggcgatcaagaaacaaattgatgctgaaaaactgccgggcatccattttcgtgaaacaccgtcgcgactgtatccaaatggcgtctttgcgagtcacgtgattggtctggctcaggcacaaggcaaaagtaccagcttgacaggcgtcatggggcttgaaaagcaattcaatacggttttagccggtacgaatggttatcgtcgcagccagactgatgcatatggctataagctgcctaacgcaaagacgaatctgaaaacggctgttaatggcggtaccgtctacacaacgctcgatagtggtttgcaggcctatttagagacgctgatgaccgacgtgcaaaataaatatgaaccaaaaggcatgacggcagtgttgatgagtgctaaaactggacagattttggcagcgactcaacgaccaacgtttgatgcttcaacgggtgaaggcttaggcgacatgtggcgtgactcgcttgttgaagacaattatgaaccaggctcggtcatgaaaattgtgacgctggcggctgcgattcaaagtggcaagtatcacccaaatgattattatcaatccggatctatcaaattggatggtggtactgttaatgactggcgaaccggcggctggggatccattcctttaagcaaagccttccctctgtcgagtaacgtggggatggttaagattgaacaggcaatgggggctggcatctggaagcagtatttagataaatttcgtttcggccagaaaactggcatcaccttgccgggtgaaactagcgggcacattagttttgaacggcccctcgaccaagcaatcacctcatttggtcaaggcattgaggtcaatgtgatgcagatgctgcaggcgatcagtgccgtttccaatggcggcaaaatgttgaaaccgcagattgtttctaaagtcatctctcagaacggcaaaaccaaagtttataaaccggaagtcgttgggcaacccatttcaaaggaaactgcggcccaagtcattgatgcaatgcggcatgttgttaacgatgaagacggcaccggtgtcgcatacaagatgcccggtgttgatctggctgtgaaaaccgggacggggcaaattgccagtccacaaggtggctatctgacaggtgattcaaactataccttcagtgttgccggggttgcgccggcttctgatccacagtacgtcctttatctggccatgaaacaaccgcaaaaaatgacggaaccggccgaatccattttggctagcatttttaaaccgatgatgcagcgggcactggatacaactgctaatggtgcggttactgatgataccaacacggccaccattccagcggtcactaacgcggcattgacaacggctcaagatagcttgaagcaagccaatttcgacgtggcaactgtgggtacaggtaataaagttgtgcaacaattaccaacaagcggtaccaaggcactgcacggttcccgagttttgcttttgacgaacggggccatgaccatgcctgacttaactggttggtcaaaatctgatgtgttaaaatttgtacaactgaccgggaagaaattcaaacttgtcggtgatggttttgtgacccagcaaagtatcgctgcaggcacattgttaggcgatactagcgggaccattaaatttaaacaacaatagaattggggatagtcatgcaacttgctcagatgctcatcccgatggtttcggcatttgcaattaccattatgttcatgccattgttcatcggctacatgcgttacaaaaaagaaggtcaggtgattcgcgaagagggtccaagctggcacgagaaaaagtcaggaacaccgactatgggtggtttgatttttattgctgcgatcattgtgtcggccatttgggtcggtatttggcagcatcaactgacgctcagtgtctgggtctccttgtttattttggtgctctatggactgcttggcttctatgacgattttgagaaactggttcatcatcgcaatgaaggacttaaggcatggcaaaagctagccggtcagattctcggtgcgattattttcctaatcgcttatttccatgaaggctttgatcacacgctatgggtgccaattatcggcaatgtcagtgccgcttggttctacgttctttttgtcattgtttggttggtaggcttcagtaatgctgttaatttgacggacggcttggatggcttggttgccggtcaaacaacaatttcatttggcacttacgcgattatcgcggcacatgacggtcggactgatgttttgatcgtttgtttggtgacgatcggtgccatgcttggtttcttgatgttcaatcacaaacctgctcagatttttatgggtgatcttggatcattagcgctgggtggcatgttggcagtggttgctatcttgctgcaccgcgaatggtcattgttgttgattgggattatttatgtcaccgaaacagccagcgtgattttgcaggtgggttcttttaagttaaccggcaaaagaatctttctcatgtcacctattcatcaccattttgaaatgaagggctggtctgagtggcaaattgatctgacgttctggttggtcgggctaattggcagtggcatctatttagcattttttctttaaaaataaggcataagcaaagaaggataaatcgtgaagaatatttcggattatcgcaataaaaaagtgcttgttttgggattagcgaaaagtggcgtgaatgcggcacgcctattacataagttgggcgctttagtgacagtcaacgacaaacaacaatttgacgacaacaaagacgctcaggaactgcttgcagacggtatgcgggtcattaccggcaggcatccggttgagctcttagacgagcatttcgagttgatggtcaaaaatcctggcattccatacagtaatccgatggttaagcgggctgaggcgttacatatgccgattatcactgaacccgagttggcttatcaggtttcggaagctcaatggatcgggattactgggacaaacggtaaaacgaccacaaccacgctgattggcttgatgttgaatcagcagcggccacatcatgcgtttgatgcgggcaatattggcattcccgttagtcaagtcgctcaaaaagtcggcaaagacgatacgattgtggctgagttgtcgagttttcaactgtgcggcatcaaaacgttgcatccacatattgccgttctaacgaatatttatgaagctcatctggattggcatggcaaccgggcaaattatgttgcggccaaaatgcgaattaccatgaatcaaacgccagacgactatttcatcatgaactgggatttgccagaaatgcatgagttggcgaaacagagcaaggcacaaatcgtcccgttctcaagaaagaacgcggaaggcgctcgagctcagttaatcgatggttggctgacgtttgatggcgatcggattatgaaggccagcgagatgcagatccccggcttacataatatcgaaaatgcgttagctgccatcgctgccgtgaaactcgaaggggtcggcgacgatgctattcgcgaagtgctgcgaacattctccggggttaaacatcggattcaatatctagaaaccattgatggccgccgggtctacaacgattcaaaagcgactaacgttgaggcagccaccgttgccttgaatgcattcgaccaaccgattgtctggctggcaggtggtttggatcgcggattgccaatggatgcactgacaccactggttaagaaacacgttaaaagcatggttgtttttggtcaaacagcacccttgatggccaagattgctaaagatgccggggtaccagttcaaacgactgagaatgtgatgactgcggtgccacttgcctatgaagtcagtcgccctggtgatgtcatcttactttcgccagcggccgcaagttgggaccaatatcctaattttgaagttcgcggcgatgatttcattaaagctgtcaatcaattaaaagcaacagtcgaaagtggggataagtaaatgcggctggtgatctctggaggcggcactggtggccacatttatccggcactggcgttgattgaagccttaaaagcggaaggaaaacttgacgatgtgctttacgttggcacgaaaaggggcttggaaagtcggattgtaccagcgaccggacttaagtttgcgacgctcgatttgcaaggcttcaagcgaagtctatcgttaagtaatttcacaacagtccggaaatttcttggtagcttgggtgaagcaaaaaaattgctacaggattttcaacctgatattgtggttggtaccggtggctatgtttccggtgccatcttatttgccgcgacacgattgcatattccaactgtgattcatgaatccaattcggtggctggggtgacgaacaagtttctgagtcatttcgttgatcgcgtggccatcgtttttcctgaagttgctaaggcttttccagccaataaagtggtggtgacagggaatccgcgggcccaacaagttgctggtttgaagccaaacgatcggctccgtgatttcggccttgatccgcatattcgtactttgttagcctttggtggttctcgtggggcgccacggattaatgatgcggttgtggcggccttgccaatttgggcgaaagcagattttcaagtgctgtttgccactggccggacgcattacgatcaaattaaggctaaattgcctgatttgccagcgacaatcaaagtggtcccgtacattgatgatatgccatccattttacccgatatcgggttattgatcagtcgggcaggggcgacgactttggcagaaatcacggcgattgggattccggcagttctgattcccagtcccaatgtgactcatcatcatcaatttttaaatgcccaaagtctaacgaaacaaggggcagcgatcacaattacagaagatgaattagacaatcattttccacgtcgggttgtgaccttgatggaagatgacgaaaaacgtgccgcaatggctaaggcatcaaaaaaattaggtgtcccagatgcaagtgatcaattgatcgcagtgatgacaacgctactttcgaaacgtaggtgataactttggcttggccccgaaaaaagaaaccgcaacctgacccgctgacaccgtggcagcaataccaggcgcgccagcagcagacgccgcgacatgatcggcgccagaagccaaaattgaatgtcgatctgccgaaagtacagaacttacggcggcgtaagctggttagaaacctcacgttgattttgctccccctgctgatattgctgggggtttttggctattttgctagtccgctatccaaggttgggcttgtgagtgtgcagggtgtgcggaccgtgcctgatcagcaggtgattaatgccacaaaattgtcggatgatgatttgatgttaagcgttatattgcataaaaaagcgatcgctcaacgtgttcaaaattctttaccagaaattaaacaagcgagtctgacgtttaccggcttgaatcatattgttatcaaaaccagcgagtatgagacgatcggttacgtctatcagaagcatacttatcacaagattttgataaccggcaaagtgctgaagaatgggacgcagacaccagttgacacttaccctgttttttcaggctttacagcgaaggaattgccgcagatgatttccttgctgcagcagtttccaaaggccattcagcgagatatttccgaaatcgatgctagtcgtggtgacgcaaatccttaccagatctcgatgaacatgaacgacggttatcgcgtgattgccgattcgcgaacaattgctaacaaaatcaagtattatccggcaattgtttcacaggttaagaaaaaaggtgttatcgatttagaagttggggcattttggcgggcatactcaagtgcggaaaagtcgtcaaacgactgattttgtaaggtttgttttctcaaggcaaatcgagtgtgttacactgataatggcaccattcaaatatgaaattaacctattaaacgttacacaaggaggttcccgatacatggataatcaaggtatttacgttggacttgatatcggaaccacctcaataaaagtcattgttgccgaaacagtaaagggacaaatgaatgttattggtgtgggaagtcagcgatcggaaggcgtgagccgcggggtgatcgttgatatcgataaggcagttgccgtcattcgtgcggccgttgcccaagctgaagacaaggcaaatatcaagatcgatcgggtcgttgctggcattcccgccaacatgctgcagattgaacaagtttccgggatgatcgcggtcggtgaagagaataaagaaatttccgacaacgatgttcgcagcgtggcagcggcagcattggtccgcaacttaccaccagagcgtgaaacattatcattagtcccgaccgagtttatcgtagatggttttgatgatattaaagatccgcgtggtatgttgggcgttcggcttgagatgcgtggcatcatgttaactgttcctaagaccgtgattcataacacgaagaaagccattgaaaaggcgggtcttcgagttggcggtttggtgatttcgcctttggccattggtcgtttggccttaaccgatggtgaacaagattttggcactgttttgattgacatgggtggtggtcaaagcaccgctgccgtgatccatgaccgtaagcttaagtttacgtcggtggatcaagaaggcggcgagtatatcactaaggatatttcagttgtcctcaacacgagttttacggacgctgagaaactcaagcgtgagtatggcaatgctgattcactggcaacgagtgaggaagagacttttcctgtaacggttgttggcaaacacgagccagcgatgatctctgaaaaatacctttccgagattatcgaggcgcgagtggcgcaaatctttaaacgtctgaacaaagcgttggacgctgtcaatgcgcttgatttacccggcggcattgtgattactggcggcactacggcgttgccaggcgtaacggaattggctcaggacattttcggccgaccggtcaaacggtttattcctgatgatatggggttgcgtcacccatcctttactgaagggcttgcccttatcaaatatgctgcccagatgacagatattgaaatgctggtctccagcgtcttgccgacaccattcatggttgatggcgcagatgtccgtccacaaccacaaagtaagcagccagagcaaccggctgccgctgtggaccaaggcaatcagcgattacttaagcgcaagcaggaaaaacaaccggataaaccaaaatccaaggagccttcagcattacgccggttctttggcaatttctttgaataaatctcgatcctaggaggaacacgaatggattttcaaatggacgcacaaaatgaaaaaggcgccaacattaaagtaatcggtgtcggcggtgcaggcggcaatgcgattaatcgcatgatcgccgaagatgttaaaggtgttgagttcattgcggcgaacactgatttgcaggctttgaatgccagcaacgctgaaaccaagatccaactcgggcctaaattgacccgcggcctaggtgccggttccaatccggagatcgggcaaaaggctgctgaagaaagcgaagaagccatcggtgctgcgctgcaaggtgcagatatgatttttgttaccgctggtatgggcggtggttctggcacaggagcagcgccgattgttgccaaaattgccaaagaccaaggtgccttgactgtcggcgtggttacccgtccctttacttttgaaggccctaagcgcgcaaagaatgcgacagagggcattgcacaactgaaagagcatgtggataccttggtgattattgccaacaaccgtctacttgagattgtcgacaagaagacgccgatgcttgaagcgttccatgctgctgataatgtgttacgccaaggtgttcaaggtatttccgatctgatcaccagccctggttacgttaacttggactttgccgatgtgaaaacagtcatggctaaccaaggatctgctttgatggggattgggagtgctacgggtgaaaaccgtaccgttgaagcgactaagaaagccatctcaagtccactgcttgaagtaaatattagcggtgccaaacaggtactgttaaacatcactggcggcccagatttgagcttgttcgaagctcaagatgcttcccagattgtggccgactcggctaaagatgatgttaatatcatcttcgggacatccatcaacgaggaacttggcgatgaagtcgtcgtgacggtgattgcgacagggatcgaagaagatccccgccaggaaccttcacgtcgcaacgttgctaagaaccgcacaacggatcaagataatcaaggcggcggttatcgcccagcctatgctgatagtgacgccaacgagaatcggcaggcaaaaagcgatgatccttttggcaactgggacttgcggcgtgaaccaagcaagcgtcaggcaccaagcggcgatgatataagcaacgctaagaaaaaagatttcgacatttttgaaaatcaaactaacgcagacgatgctggcggcgatgatcagccaccattcttcaagcgtcggcgtcaatagtcaggaggtcatgatacatggcgtttgaaaagttaggcgaaaaatttagcaacttctttgccatggacaatgaagatgattatcaagaccaagaagacgaacaggcgcaacaacccgcaccagaacaaccggtggacaatcattatcgcagcaacaaggtggtttcaatggcaacgcccgctggtaagacagcgaagatcgtggtttatgaaccgcgagtgtactctgatgccaaagaaatcgggtcgcatttattgaacaatcgggcggttgtcattaactttgatcgcatcggctccgatgatgcgacgcgcattgtcgattttttgacaggcactgtgttcgccattaatggtgagattaaacgggtgggcgagtcgattttcctcgtgaccccagctaactttgaaattgatgggtcacttgccagcaccattgactctgacggtttgaacctttcttcgcaacattaacgaggtgtcaagtgttcaatttactcaatgcaatctatcaggtgggcagttgggcaatttacctttatatcatcatggtcttcatttacattttgatatcttggtttcccaatgctcaaggctcagcactggatcgctttttaagcagatttgttgatccgtttctgagcatctttcagcgattcatcccaccattggctgggattgatttttcaccaatcctagcattctttgtactttcacttattaaaatggcttggacgaaattatttatcatgttagtccagaagcttgtaatcgggtgacaacttatggatgccatctatcagcattttcgaaaagatgaagcggcactgatcgaccattttgcggaactaattgaaaccgcacgaacggagtaccggccagtgctgacagactttacagatccacgtcaatggttgattgcaaccagtttagtaagcgccgatgacgatattaagctcgtacattttggcgggtatccccatgctgagcggcaacgaatcatctttgcaccgagctatttctcagcaacggcggctgattttgatattcggttgttacagatcatttatccggagaaattcgccgaactgcaccatagtacagtgcaaggcaccctactgaacgcaggccttgatcgtgatgttttcggtgacatcatcacggatggtgacatttggcagttctttgtggccgcgcacatgcaggattgggtcacaagcaatgttgataaaatcgggcgcgtgggtgttcatttcactgaacatccgctggcggattatgtgacaccggaaaatgactgggagccgctcaatttttcagtcagtgctttacgcttggatacagttgtggcccacggctttaacatctcgcgtcaacgtgccaaaaccttaattcaaggcggtaaggtgcgtcttaactttggtgaatcggatgcaccggatgctgaaattgcaacatcagatattatctctgttcgagggtttggccgcttgcggcttgatgagattcttggagagagtaaaaaaggtaaactaagggtctcagcggccgtgattcataagtagtcacaccgccgagttcaacaattgtcccagaaaacgaattgatgaggaggactatcaatggctttgagtccactagacattcacaataaagaatttggcagcaaaatgcgcggctatgataaggacgaggtcaatgacttccttgcccagatcgttaaagattatagtagcttgatcaaggacaacgagggcctgaaaaaagaattggcagatgccaaggaaaaggttcagtacttcacggatatgaaggaagccttgaatcaatcgattattgtcgctcaggaaagtgctgaaaaggttaaaaatagcgcgcatcaggaagctgatttgattaagcagcaggcgcagcaggatggtcaggctattttgagcaaggccaaagcagatgctgaccagaagttgcatcaagctcaagctcaaacggaacaaaccttgcatgatgccgcattgaaacgtcagaatatttctgtccaaactgaagacctcaagcgacaaagccgggtcttccgccaacgtctgcaagtgatgttggagtcacagcttgaagttgtgaagagtccagagtggaaggaattgctttccagttcacctgaagctgccgatacgaccgatccgagtcaagattcgcttgacaatgcccacgagggtttcgtaaactcagagggagcagtttccggcgctgatggtacctatactgagatcattttcccagatgatcaaagtggcgcaccagcctcgcaagcagcagcagatacaccggctagttcggcggcggctgagtcagaatcgacaaatgacagtaccaatgattctgagtctgcaaccgatcatgatgctcaataacgtatgaacacgcgtcgtttggtggttccctttgcagcgagtcaggaagtaggtgtgagcctgacaagtaccgctgaacgatatcagttcacagttgtcctgccgaagttggtaagcgggaccggttgatcaccgttagtcaatcactgagggggacttgttccctgaagttaggtggtaccacgtttgctcgtcctaatattagggcgggcttttttgatttcaattaataaaggagcgggtcacgtgaaaattaaagataccttgaacatgggtaaaaccagtttcccaatgcgcgctggtttaccgaagaatgaaccgatttggcagaaaaagtgggatgaggaccacgtctatgagcaacgccaaaaattaaatgaaggcaagccaacgtttatgctacatgatggcccgccatttgcgaatggcaatattcatatgggtcacgccttgaataagatcagtaaagatattattgttcgctacaaatccatgaatggcttccgggcgccttacgttcctggttgggatactcacgggttgccgattgaacagcaactagcgaaacaaggtgtgaagcgcaaggaaatgtcgatgaccgattatcgtgaactttgtcggcagtttgccatgcaggaaatcgataaacagcgcactgactttaaacgcctaggcgtgatgggtgactgggaacatccttacattacgctgcagcatcattatgaagccagtgaaattcgggtttttggtgccatggcgaaaaagggctacatctatcatggcttgaagccggtttactggtcatggtcatctgaatcgactctggccgaagccgagattgaatatcacgatgataaatcaccatccatttacgttgcctttaaagtggtggatggcaagggcttacttgacactgatacctatctggtcatctggaccaccacaccttggaccattccggctaactatgggattacggttaatccgcggttcgattacgttcaggttcaagttggcgacaaaaagtacgtggttgctgccgaattacttgatcgcgtagctgaagaaattggctgggaaaatccgaagatcctgaaaaactttaagggcacggatatggataaaatgactgctcagcatcctttatatgatcgcacgagtcttgtcatgaatgctgatcatgtcacgttggatgctgggactggacttgtccatacagcgcctggtcatggggaagatgactacaaagtcggggttaaatacggcttgcctgtcgtctcagtggttgatgccaaaggttacatgaatgaatatgcgcctggttttgaaggtgtcttttatgatgatgccaacaagcagatcacccaagcactggctgataagggcgccctgctgaagcttgatttcttcacccatagctatccgcatgactggcggacaaagaagccggttattttccgggcaacgacacaatggtttgcgtcaattgatgctttccgtgatcagattctaaaggctattgatacggttgactttaagccgagctggggcaagacacggctgtacaatatgattcgtgatcgcggcgattgggttatttcccgtcagcgcgcatggggcgtgccgttgccgatcttctatgctgaagatggcgaaccgattattgaagaagagacaatcaatcatgttgctgatttgttcggaaaatatggctcaaatgtgtggtttgagcgagaggcgaaagacttgttgccagaaggctatacgaatccgcatagcccgaatggtcaattcaccaaagaaaaagacatcatggatgtgtggttcgattccggttcctctcatcaggctgttttggcggctcgtccagagctcagtttcccagctgatttgtatttggaagggtctgatcagtatcgcggctggtttaattccagtttgatcaccagcgttgctgccactggtgtcgcaccttatcgcggtattttgtcgcaaggtttcaccttggacggcaaaggacgcaagatgagtaagagcctaggtaacacgattgtcccggccacgattgaaaagcaatttggggctgaaatcatccggctgtgggtcgcaacggttgactcttcctctgatgtgcgagtttctgtagataactttgcccaaacttctgaagcttatcgaaagattcgaaatacgatgcggtttatggtagctaacacaggcgacttcgatcctgaaaaagatacggttgcttatgatgaacttggatcagttgatcgttacatgatggttcgcttaaaccaaatcatcaagcaagtcaaaacagcttatgatgcgtatgattttgcgaccgtcgaaaagactatcagcagtttccttgtcaatgatctgagtgctttctatttggacgtcgctaaagatgttgtgtacatcgaggcgaaagatgatcctaagcggcgtgggatgcaaaccgtgatgtttgccgccttattggccctcactaagttgatcacgccgattctgccgcacacagcagaagaagtttggccatatctcaagcagccagaagcctatgctgctttggctgatatgccagaagcagaacagtttgatgatgaaagccaattgttagatatctggtcaggctttatggacttccgttctgaagtgcaaaaggctttggaacttgctcgtgacaacaaagttatcgggaagtcgcttgaagctgcagtcacagtttatccttctgaacctgttcgcgatatgctggatgacgtcgatgccaatgtgatgcagcttttgatcacaagtcacttcgaaattgcgcctgcaactacgcaggcaccggccaatgccgaacagtttgatgacatggctgttgttgtaaaacatgctgacggcgaagtttgcccacgctgccgaatggtgcgtacagatattggtacagatccaaagttgccgcaattgtgcagccggtgtgcagctatcgttgaggctaatttcccagatgctgtcaccaacgggtttgataagtaggcaggtgaagacatgcaaggacgcgttaaaaactttaacgttgacaaaggctatggctttattgaagctgaggggcaaccggatattttcgttcacttttcggcgattaatgaaccgggatttaaaagtctgacgcccggtgaaacggttgatttcgttattgttgaagggcctcggggtccacaagcagcgaatgtgacggttcatcgatctgaagatggtgctccgcaatagactttttgatgccccgttgtcggctggcgatagggcgcttacggaaactctagacagtaaaaaaacaccgcgagatcaaatcgcggtgtttttgtatacagcattcagtttttgtggtgcaagtttttaaactttaattacttgttgatttcttcgatcttaccgtcatgcgtacgggcaacggtcatctgagtaacggggatgtaaccgagctttggtaccaatgtcttttggacattctttgactgaatataattgatgaaagctgctgtggaggcgtttggtttgcctttggtgtacatatgttcataggcccaaatcttccaagtgttggtggtcacattcttgtccgttggttggacatgattaagggcaagcttttgaacaccgtctttaattgctgagaaggcgagatagctgatggcacccggtgttgttgaaaccatctgataaacagtaccgctagaatcttgttcctgactggttttaactttatttgtcttgatcccgaactgttcgaacgttgctcgtgtcccggaaccttgtgcgcggttaatcaatacgatggcctgatctttaccaccaacttctttccagttagtgatcttgccttggaaaatatcaactaattgctgcgtggagatgtttttgacgccggcgtccttgttgacaactggtgcaatcgcaacaacggctacctgatggtcaaccagatcatcagctttcaaatcagatttttcttgggcaaaaatgtctgaattaccgattgtaactgaaccggctgcaacttgactcaaaccggcgcctgaaccaccaccttgcacggtgatttctgccttaggattgtctgtttgatattgcttagctgcctgttcaaccaaaggctgtaaagctgttgaaccaactgccaaaatcttgctctgcttgattggggcagagctggatttgcttgaactgctggcggatttggacccgcagcctgccaatactaaggtggcggctaaggccacggtcaaaccgacgaacaatttcgaatgcttcattacttttccctccaatacttgaataacctaagcataaggttgctgtgtaaagacttcgccacgttgctgtaaagaatacgttttacttttgtaaaggctgtaacggttcctttgaaatgccgacaacactcggcgtataatgacgcagataggctttattaaaggagcggaacacgtgaaaaattacattgaggacaaaaatgttcagaaaaatcggtggtggatcctaactgctatcggaatgtttacaattatgtcgacgctagatgggtcaattgtcaacattgctttaccagtgatgagtcgcgatttacatattccaatgaatcaagcggagtgggtggtttcgatttatctgatgatgatctgtggtttgttgctgttttttggccggctaggtgattcaattggcaaaatcaaagttttccgagttgggatggtgctattcttaattggttcgctttttgccggtttcaacaatagccttgccttgttgcttgctgcgcgaattgttcaagctactggtgcatctatgaccatggcgaacaataatgggatcgtaacggagatttttccaatgaatgagcgcggtcgcgccttgggtctgatcggttcctttgtgtcgattggtgcaattgctggtcctgggattggtggtttgattttaggccagttgccttgggggtatattttttggatcaatattccgattgggattgtcgctttgatcctcggaacgattgttttgccaaaagatctacccagcaggcgcgtgccgattgattgggctggttttgtgacgtttctagtcttgatcttgtccctttttatggggatctttttgggacaggaacgcggctttaccgatcccctcattcttgggctgtttgcattagctatcgtggcgttcgctgcctttgttcatattgaaaatcataaaaccgatccattggtcagcttcaagatttttcaaaacagtgcgtttaccctgagtttgttgtctgcgttttttattttcgtcacgaactttttcttcaacgtcatttcgccgttttatcttcagaatgcgcggggattatcaccagaaaaagctgggtacttattgatgatttttccgattgtgcaagtgattgtggctccggtggcgggtagcattgctgatcgcatcggtccttatcgcatcacaatggtaggattgttgatcattgttgccagtcagattgggtatgctttcttcaatttgcagacatcgtttatgtttgttgcgttgatgatcggcttagttggatttggcaatgggctgtttcaagcaccaaataatactgtggtgatgtcgagtgtgccgacacgtgatttaggaattgctggcggtatgaatgcgttggcgcgtaatttaggaatggtcgtcggcatctcaacggccaccacagtgctgttttcttccatgagtcatactgctgggaaaaaagtaaccacttatctggctgggcaaccggacattttcatttctggtatgcatgtttctttttgggttgcgacggggttgtgcatactagcggtgattttaaccggctatcgcatgtggcaggtacgtcatgagacagctgtctaagtgaaagacataaaaaaagcatcccggcttttttagcttcattgcggggatgcttttttaattggcgaaatgtttttatagcagacaactgactgatcagttgtctggtgtgacgtctttggggccttgatgactcatatcaccgtgcgtataatttagcagttgttccttcagttcgccttccatttggaccagttgcttttcggcattttggcgtttaacccgaccgtcttgttgaatctgcaaggtctgtttcaaagtgtcaatcaagtcgttttgtgtttgcgttaacgtctcaatgtcgacaacaccgcgttcattttccttcgcagtttcaatcgaactgatcttcaacatgtcactgttcttctttaacaggtcattggtggtttgcgagacttgtcgctgggccgtgacagcatctttttgccgcaacaaggtgagggcgatggccacttgatttttccacagtgggattgctgtgttgatgctggcttgaattttttcggccaaagcctgattcgtgttttgaatcaggcgaatctggggtgcttgttgaatggtaatttgtcgagccaattgcagatcgtaagcacgtttatccaaacgtgacgcgaattgtttcagatcattgacttgctgaattgccatttggtcattggctgcttcggctgctttcaccgcttcaggaatggttttgtcattgagttcacgcaacttaagattggccgcttcaatataaatattcagagcatcaaaataagctttgttttgatcatataattcgtctaacagcttgttatcattgagtaacccgcgttgtgatgtttcaaggcgattggcaatcgtatcaatttgagcaccgatcttttgatacttcgcagtgatttcatagattgatcgcttgacacggccaaataatttgcggaaaatattattattttcagcttttaattcgtctgggttagcctcgttcaatctcgtcatgagacttgtcaaggcatcaccgactgcgccggtatcctgactttgaactttagttaacatgttttgtgaaaagacgccaagttgtttttgggcatcagcgccataattcaaaacagtttcgcctttcgtcacatcgattttgctggctaattcttgtgcttttgcttcttgttcagcacttagttttggcctcgctgtggccgctgcttgaacagcctcagccgaattgttgttggtcattgaagcttctgacgtactgaaaggatcggctaataaatcatctgtcagattggtttgtttgtcatcattcacattattcactccgtttcatgcgccttatctggatcaaggtgttttttggcaagacgaacatcgctatcgagatcatcaagatcatctttaatgaaggcttgatagtctgacttgattttgcctgccatagaagtcatggtcgaaaatgctttgtctaaggtttcgtacgtatctgccgtcttaacctcgtgatgcgtaatctgggcatatttttgcatcagatccagtaaattaggtacctgctgataaacgaacgtgccggcatcggttaagcgttgtggtgcttgaacaagtgcctcaaaataggcatgcagcaggtcaaccaaatcggtatttaatgtgagcgcacgcaactttggtacttcttttgtgagtgcctcgatagttcgaatttgttcggcaagatcggccattgtttttctaaaaagtttgatttcctcatcacttaaaccggatgcagcataatgttcagccatcttcggatcaagtgacgggagactggttgattttggcttaggccggcttagttcaccgatatagcgggcgaaggcaaagaccacaccaatggacaaggcgatcacccaacgtccggacagtgcacctattgccgcacccatggcggcccagagtataattcgccatatgcgaatacgtttgcttgtggccacgagatcacttcctctttcgtttgcatttagtgtagcacaaccccgcggcttgactatcagccggaagttggatattagtaattattttattaaggatgcacggttgtaggttggctggtgtaagctgataattagggttgtttggccattttgaagctttagaagggagcatggactcgcgcggttagaaaccagcacttaaacgggtttaggcggtgatgaccattttttggtcatgatggccggggtctttatgtgaagatttctgcgcctgcgaatgcagttaaggaggaaaaatcaagtggacgaagaaccgatcgctcagcaacgcgtttttactgggcaattaattgctgtggatgaactcacagttaagttgccaaacaacacaatcgcacagcgagaaattgtacgcgcccaaccagctgctggtgttttggccttaaaagacgacaaggcgctgtttgtcagccagtttcgatcaacaatcggtcagatgacattagagattccagcaggtaaaatcaatcaaggagaagcaccgctcacagctgcacgccgggaattaaatgaagaaaccggcatgacggcgatgaagtggcaacctttggcgagttactttcagtcactaggtttttctgatgcgaccatggctttgtttctggccagcgagctgcatttggcaaccaatcaattgcatcaggatccggatgagttcgtcaaaggcgaatggttgacactgccagaagcttggcgagcagtcgatgacggtcgcatctgcgatagcaaaaccttgctggctttactttattggcagcagcaaggaataggagcgtgaaccggcttggtatataagaggtcgtaagtgtgatggtcattttttgacgagtgcaatgatgatccttatccgcaggcttctggcttggcaaacgcgttaaaggagggcaacatggcggaagttaacacgcgcaaagcatatcgtgaggcacaggaaaaagaacaacacgcggcgcgcgcccgcgaggccaaacgagttgaagttgaaaaagactatgctcgcaaaaccaaaggcaaacccgaaatcaagaatgcccgttttgacgaggtgaccttcaggaaggtcaacagtctcaaaaaaagattgaattgggccatcgggattgtctttggcttgttggtgattgtttttctggtactctattttgggtaagctagctattcttggcacttaccagaaatggctactgtagcgcaagcgcagtggaagaaagttgattcactaatattatagaagaaagaacggagcgatattttgataaaagtcggcgttatttgtgccatggaagaagaaatcaggaccttactggccaaacagactcagcaacatgaaacggtgattgccagtcaacattattttgagggccaaattgacgggattgatgtgattttggttcagtctggtattggcaaggttcaagcggccatgacggcggctttgttgttgggaacttttaaaccggatgttgtgattaacaccggaagtgccggcggtattggtcaaggtctggcgatcggtgatgttgttatttcgagcggggttgcgtatcatgatgtagatgcaacggcttttggttacttaccagggcagttgccacaacagccgcaaatttttgaagccggtttagactatgtggctaaaattcaggcggcagccagcacaaccggtttaacgtcaaaggttggcctcattgtgacaggcgataagtttgttaacggtcaggatgcgattgcggcaattctgaaaatctatccgcaggcgttagcaagcgaaatggaaggggcggctatcggtcaggtggccaaagagttccataccccgtttgttgtcatccgggcaatgagcgatgtcgctgacgagcagtccggagtggattttgacaaatttgtgatcaaggcgggcgaacaaagtgccgcgatgcttcttagcttttttgctcacctacaggcatcacctcagtcttaggagttgattgttaatatgcaacatgtttatcttgataacgcggcgaccacacccatggccccagaagtgattcagaccatgatggaccaaatggagcacgattttggtaatgccagttcgactcattggtttggccgaacagctcatactgtcatggacaagagtcgcaaaattttggccgatgcaatccatgcacagcccgggaatatggtgatcaccagcggcgcaacagaaagtaacaatacggcgatcactcaaacggcgcatacgcgtgctagtttggggaagcacatcattacaacggctattgaacatccttccgttttgcagccgctaaaagccttggaaaaggaaggctttcgggtgacctatctgccagtcgacgaaaatggccgaatcagtttagctgattttgacgcggctttggacgatgacactatcttagtgaccatcatgatgggcaataatgaggttggcagtcggatgccaatcagtgaaattggtgcgcgactagtcgatcatcaagcttggtttcatacagatgcaacccaggcttttggcttactagacatcgatgttcaagcgcaacacattgatatgttaagtgtttcggcgcacaaaattaacggacccaaaggcatcggttttctttaccgcgatcctaaggttcagttcccgtctttgttgaaaggtggcgagcaggagttgaaacgtcgtgctggtacagaaaacattgctggcattgccgggtttgcaacggcggttagtctgatcacttctgatgagaaggctaagcggcagtcaaagtatcttggttttaagcagcagattatgggtgcattggatgatgcggagattccctatgcagttaatggtgatattcggccagataatgtcaatcacgttttcaatatctggttgaaggggatctcaacatacgctttgcagaccaaccttgatttggctggcattgcagtttctggtggttctgcctgcacagctggttcacttgagccttcacacgttttaactgccatgtttggcgctgatagcccgcggcttggcgagtcgattcgtttgtcatttggcgcgcaaacaaccaaagcagacattcaggcctttattgatgccctgttaccaatcgtgcaacggcttcaggcaaaacaatcggcgcgataagtttggtttgcgagtgacccgttaccatgcgtctcaacagttaaaaagctcaagattgtctttcaccacctaataatccttatcaacctccccagtgttgcgaccaatatgctaaacttataaacagttaagcgtgttcctcgcatgcgctgaaataaaaacagtttcaccacctttttgctggtgaaactgtttaggggaggtttttgtatggcactagcagcaaccggatccgcacaaggcgatccgaaaacctatcaaatcgggtcaacgttgaaacgatttaccttgatagatttaggctttgttcaaactaagaacggcaattttcaactgcaacgctcgcttgatccaaattcaccgtacacaacggcaaacaagctgaaaatgacggtggcaaagaatttagataagttccagctcgatgtcacaacgggcaatggtcttaaagcgattaacattttcaaaaccgatgccacaaaagaaaatgtcgagcaatatcaatattggatcaataatttgattgagcgcggtgtgattgaagcaaaataggatgtatgccgcgctttaacattaagctgccacgatgttggcctcagggaggctgacagcttagcagcttttttgctttcttttgattagatcaaaccttacgaagcgatcgtattcacagtaaaaatgtcaatctgtagcaaattggtttttatgattatcagaaacgctaaagtgataagctgaaattaacgaagagaagaaatggagggataatatgtttgaccacggcttcattgaggtccacgatgctaaccaaaataacttgcaacacgtcaacgtaaagattcctaaggatgcgattagtgttttcgtcggccgatcaggttcaggtaagtcttctttagtttttgataccattgccgctgagtcccgccgcgaactgaatgagacttttccgagctttacccaacagtatctacctaaatatggtcagccggatgtcggccaaatcgaccatttaccagtggcaattgttgtcgagcagaagcgcattggtaaaaatgcgcggtcaacgcttgccacctatacgggtatttattccttgttgcggttgttgttttcacgagctggcaagccgtttattggctattcggacactttttcttttaacctgccacagggaatgtgcaagacatgtcagggactcgggtatgtggatgacattgatgttaaaaagttaattgacccgaacaaatcgttgaatcagggcgcgattacgtttgtcagttttggaccagacacgtggcggtggaaacgctacgcttacagtggtttatttgataatgacaaacgattgggcgactatacaaagcaggaaatggacaccttattgtatgccccgcagcaaacactagatcatgcgccaacaaagtggcctaaaacagctttgtacgaaggcgttgtgccgcgaatcaggcggtccattattggtaagaaagaggctgaacatcataagacggcgttggcagaaattgtcactcgtatgccatgtccaacctgccatggaacacgtttgcggccagaggttctgacttgtctcatcaatcaaacgaatattgctcaagtgctgcaaatggatctcgtcaaggttcgccattttctgaatggcattcaagaaccacttgttcaggacgtgatccgtgagctgttacgaaaaatcgattctttgattgacattgggttaggctacctatcccttgatcgaccgactgagacattgtcgggcggcgaaacccagcgcattaaaattgccaagtttttgactagtgccttagtcgatatggtttacattttggatgagcccagtgttggcttgcatccgcatgatattgaattaatcaagcgtgccattttgcgtttgaaggagaaaggcaacactattttaatcgttgaacacaatccggcactgattgcgattggcgataatattgtcgaagtgggtcccggagcggggacaacgggcgggcatatcacctttacaggtacctaccaagcccttttagacagtgacactttgacagggaaactgttgaaacagccattgacttttcgccagccgcggccagccacatcaacgatttcattgcagcatattcatcgacataatttaaaagatgttagtgtcgcagtaccgctgggcattgaaactgtgatttccggggtcgctggttccgggaagagtacgttggtatctgctttacgtgatcagttaaccgcaccatatattgatttggcacaagccgatatcggtgctaatatccgctcagcgcctgccacatatctctcaatcctcgatccaattcgcaaagtctttgctgacgcgaatcatgtggctagcagttggtttagttacaacggtcgcggcgcttgcccacgttgtaagggtaaaggcgtgaccattaccaatatggcgttcatggatccggttgtacagacttgtgaacaatgtcatggacgacgttacaatgatcaggccctgagctacacttatcatgataaaaatatctctgacgtgctgcgcatgccgattacaaaagcacaaaacttttttacggatgtaccagctattgccgcaccattgcgaaatacgcacgggttggcctcgactatctaacacttgggcaaccattgaccacactttccggtggcgaaaagcagcgtttaaagttggctgtcgaattgaaccgcaccggtaccttgtacttgcttgatgagccaaccgctggcctacatttgcaagatgtgaaaaagttgatccagctatttgacgaacttgtcgcagatggcaactcgttgatcatcgttgaacacaacttagaggtcattagtcaggcagactggctcattgacatgggtccagacgctggcatctatggtggtcaagtccgctatacggggacacctgaaaatagcatgactgtcaaacaatcacgaacgggccaagccatgaaacaatacaatcaggcgccggaacggcaacaaaataataggcattgacgccaaacttgatgtatttgtattgaccgttctgcgtcacgttgcactgaaacaagaatgagctggtgacttgttgtttgcttggatcatcagagaaaaactaaactagcatagaccagaaaatgatggtttgcagttccgcgtaagcagccgccagcctaaataaccaaagcttggctatttggactggcggctgcttatgtctagatcgctattggcaagcttgttatttttgactgaaacgcgttcgctaccccagaaacctgcacataaggacctcaagccaaatggccaaagaccagccatttaggcttgaggccacttatgctccggtttctaaccggggtgggtcacgctcttgctgaaacgcgttcgcaggcgcagaaacctgcacagaaggacctcaagtctaaatggccaaagaccagccatttaggcttgaggccacttatgctccggtttctacccgcgcctgctcacgctctaacggttgctatctcatcattcactgttataatggtttttactggaattcgaccttcaaatcggatatctccagaatctgatgaaatgatggtgattgttttggacaattccaacatccgtgttgttgtcggcatgtccggcggcgtggactcgagtgtcacggcgctgttgctgaaacaacaaggttatgatgtcgtcggggtctttatgaagaactgggacgacacagacgagaatggcgtctgtacagcaacaacggactatgaggacgtcgccaaggttgctagtgaaatcggcatcccatattactcgattaactttgagaaggaatattgggatcgggtttttcaatacttcctcgatgagtacaaggctggccgcacaccaaaccctgacgtgatgtgcaacaaggagatcaaatttaaggctttcttggactacgctgatcagctcaacgcggattatattgcgatgggtcactatgcgcaggttaagacagacgaaaacgggatcgtgcacatgcttcgcggcgctgatggcaataaggatcaaacgtactttttgagccagctttcacaggatcagcttaagaagtcgcttttcccaattggtcatttgcagaaacccgaggttcgtaaaatcgccgaggcagcgggactggcaacggcaaagaagaaggactcgactggtatttgctttatcggcgagcgcaatttcaagcagtttttgagcacgtatctgccagctcagccgggcaaaatgatgacggtggatggtgtcgagatgggtacccatgatggcttgatgtattacacaatcggtcaacgccaaggcctcggcataggcggtaactcagataattctgagccatggtttgtggtaggcaaagatttagacaagaacatcttgtatgtcggccaagggtttgacaacccagccttgatggccaccagtttgagcgcttctaaccttaactggacgactggtcaggcaccggcagaaggcacccacatgacggccaagttccgttatcgtcaacgggatactggcgtgacgcttcattatcatgatgatggcaccgccaccgttgactttgacgtgccagtccgcgcaatcacaccgggtcaggcggttgtcttttatgacggcgacgagtgcttgggtggcggaaccatagatgctgcatacgcacacacgaatgagttacagtacgtttaattaaactgagtgcaaaaagaaagtcggcgattatgtcggcttttttacatagcggcggctgattgctgcttgaaacgcgttcgcaggcgcagaaacctgcacataaggaccttgatcgcaatggtcaaacccgggccatcacggtcaaggccgcttatgcttcggtttctaaccggggtggctcacgctcttgtctgaaacgcgtttgccaccccagaaacctgcgtgtaaggaccttgaccgcaatggccaaacccgggccatcacggtcaaggccacttacactccgatttctaaccggggtggctcacgctctgcttgaaattttccttcaaaatctcgataatgaaagagttaagatgcgaaaggatagtacggtcattgattgggacttttgaatcattggtcgtgactaaaggggattgacttgtgacgaagttgtattttgtacgtcatggcaaaacagaatggaataatcaagggcgttatcaaggcgctaatggggactcgccgttattgccggagagttatgcgcaaattaaggcgttggccggttatttgcaaggaattccttttatgcatgcttatgtcagtccattaaagcgtgcacgaacaactgcccaaaccttgattaaagatttggatgagtcaattccgttgaccattatgccagctttgcgggagttcaatctcggtaaaatggaagggatgacgtttactgatgtaggtaagcattttcctcaggagctgcatgcctttcgtcatgaaccggcagcctatgatccacgaaaaatacatggggaatctttttcacaactgattaatcgggctattccggcgatcgtggcgactgtggccatggatcgcactggtgaggctaatttgctgtacgtcagccacggggccgcactcgctgcggtgattcaaagtctgttgggcacaccactggcggatattcgcaaagacggaggtttgaccaatagcagtgtgaccattttgcacgcagatggaccgaccttgccgtttaccttgctggattggaatgaaaccagtttcttaccggaaccgccaaaagcaacggatacgatttgagttgctacggctgtcaacaacgagataagagggtcaaatggattcaaaaattttaaccatgttcaaccaaggcaagcatgaggaggcgattcaagcggcagtcaaagccattgatgctgcccctgatgatccgaaacgctatgcgatgttggcaacaatgctgattagtatcaaagcgctggatcaggccggtgaattgctggccaaagcgcgccagctttttccagaggatctggaattgcaatacaccgctggcttgtttgcgtatgctcaagcggactttgcggctgcagtctcatggtttgccaaggttagaaccgaccagactttgaaaaatgatgctacctacatgttggctttaagctaccaacaagctggccagccaacgaaggcattggcgtttgcattaacggcgcatgacttggcgccaaagcagcttgatgccgcccttttagcagctgatttgctgatggcaaacgatgtatttgatgcagcagcccgagtgttgaaaccattgttggcaaccgaacagccacaggttctgttcacgtacggcatggcactgagcgccgctggtaaagatggcagtcattatttgaacaaggccaaggcactcgatccaaaagggtatgatcaaaaagctaacattgtcgctgatatcaaccgattcttgcgattgcaggagggtcaagatggacacgcgtgaggagactgtcaccggtcgggtcaaaagtatctttttccagaatccaacaaatttttttaaaattctgctgatcgaaatctctgcgacgactatcacctggacagagtcagatattgtggtgacaggaacgtttggtgatattaaggaagatgcgacctacacgttcactgggcatgtcgtggatcatcctaagtatgggcagcagtttcaagcagacaattaccatgcggatcagccgacgaataaaagtgggctggtcgattatttgagttcggataagttcccggggatcggtccgaaaacggcaacgaaaattatcgatcatttgggtatggatgctattgacaagattctggatgatccgaaggttttggcgggcttaggcatgacagctgccaagcgtgatatgttggcgacgaatctgaaatcgaaccaaggcatggaacgggttattattggtcttaacgattacggctttactagcaatatggcaggtcgtatttaccaacaatatcaaaatgacgctttagatgtgattaagcacaatccgtatcaattgattaacgatattgatggtatcggctttactcgggctgatcagattgcggcaaaattggcgattgccccgacttcgcagcttcgtcttggcggtgcagtgatggataccctgcagcggttgactgatggcgaaggtgatacctatgtgacgctgaagtcattggtcactcagacacttgatttattggaacgggcgagaaacgttgccgtttcgccagacgcagtaggacaggcaattgtgacgctggctaaagacaacgccctgattgcagaaggcgaccgcattttcccgaaacgattattcgatgctgaatggcagattggtcggcaactaaaaggactggcagaggcagacgcaacggctaccgaacctgaattggctgagattgaaaaaacgttagcggcggtcgaggcggataccggtattgcgtatgatgcgacacaaagaaaagccattgtcacggcgttacagtcgcccatttttctgttgactggaggaccgggtactgggaaaaccacagtaacagatggtatcgtgcggacgtatgcacggttgcatgacctttcattggatcttgatcagtatacgactgacgagccatttccaatcatgctggcagcgccaacaggacgggcagcgaaacggattagtgaaaccacccaactgccagccagtacgattcatcgcctgctcggtttaggtgttgacacgcaagaatttgcacctaatgagttaccaaatggcctgttgattattgatgagatgtcaatggttgacacttacttgttccggacgcttttaacggcattacatcccggaatgaaaattgtcttggttggcgataaagaccaattaccaagtgtcggtcctggacaagtattcgctgatttattgcgcagcggcgtgctgccgcaaacagcgctgacgcatattcatcgtcaggatgccgacagttcaattattccgctagcgcatgcagtgaatgctggcaagttgccggatgattttaccaagccgcaagttgatcgcagttttttggcgtgtgcgcctagtcaggtacctgaagttgtcggacaagtggtgcaacgagccgcagtcaaacaattctcgatcgcggatattcaagtgttggcacctatgtaccgcggaaccgctggcattgatcgtttgaatccgttactgcaaaacattttgaatccaaaacgcagtgcccgaacgaaagcaattcagtttggagaaacggaatatcgaattggtgataaggtgttgcaactggtcaatgatcccaaccaaaatgtttttaacggtgaaatcgggcagattgtcggcattactttgggcaaggaagccgaaagcaaaacggacgaattaacgattgattttgacggcaatgaaatcacttgcaaacgcagtgattttaataagattacgcttgcttatgccacctcgattcataaagcccaaggcagtgagtttccgatggtgattttgccgctaaccttgcaaagccgccggatgttgcgacgtaacttgttgtacaccgccattacgcgggctaaatcatttttgattttggttggcgaactggcagcctttcaggaagcagtcagtgaagtagccgttaatcgacatactgggctggtcgatcggctcatgaccgtgtttggcaaaaccgttgcccctcaggttgctgatgattcagcaaccaaggatatttcagcaagtcccagtgagccgcaaattgacacaactgcacttgacttggataatgaagttaaacaacaaccaccggcagcgcaccaattaacgcctgccttggtggcttctcaacgaatcgatcccatgattgggatggatggtatcactccgcaaatgtttatgacgaaggagaattaactagctatggaggacaacatacgcaagtcactggtgattaagccagtgacgcctcaggatctcgagcagttcaacgatctattaacttatgtgtttcaagtgactcaaaaggacttggaacaatccggttatgaggaaggggagttagaacgagctaagcgtccagttttagagaaatcggatgttttgggctggtttcacaaagatgagcttgtcagttcactggccatttatccttgcacagtgaatattcacggcacattatacaaaatggctggtttgacaggggttggcacgtatccagagtatgccggccacggtttgatgcacgatcttgtccgacttggcttgcagcatatgcgtgaccacaagcagtggatttcgtatttatatccttacagcatccctttttaccgaaaaaagggatgggaaatcatgtccgatcatctcacttttgacgtgaaagacacacaattacctaaacaggtgaatgtgcccggacatgttgagcgtctggaaatcgatgatcctgatgtgattgaaacgtataatcggttcgccatgaaaaatcatggggcgatgatccgcaaccagttgaattgggacgaatactggcgttgggaaaacgaggaggagcgtacggctggtgtttattatgacgccaacgatgaaccacaaggctatgttctttattggattgccgacgaggtcttccacgtcaaggaaatgatttacaccaaccaagaagcccgagtcggcttatggaactttattagtgctcatttttcaatggtgacgcacgttaaaggtaacatttacaaaaatgaaccgttgcactttttgttagatgatggtgatatctatcagacgatcaaaccatactttatggcccggattgtggatgtgaaggcttttctgaagcagtatccgtttgcggctgaaacgcctgagtcgtttcattttgtcgtaactgatcctttggcgccgtggaacaatgggacctttggggtttattgggacgaaaaaaatcaagttcaaattactgaccggccggtgggtgaggagataaaaactgatatccaaaccctaacaaccatgttgatgagttatcggcggccatcgtatttggctcagattgaacgactttttgctagtaagcatgcgattaagttgctggaaaatgccattccaatggaagaaccttatttttcagattatttttgatcgtcatgttcaatcacagaaaagcgctgcacctaccagaagaaaactggcggtacagcgctttttgatcggtttaaatactgcgatcaatccaaaatttttgtttggccattgagaagtcgatttcaaacggccgtgttcccatttcctcgccatccatctgaccaaactcgagcgaactggtctcaactgttaacttgtctgcgtggaaaatgtgagtagcccgacttgtcggttttttaccacgcatgagttgaatcatcgccaacgcccatgagacgatattaaaccactcaacaatcacgagatcaagtttcccgtcggttgggttagccggtttgtaaagacgaatgccgccgccaaaataaggaatgttggtggtggtgcagatataggcgcgatgaaaaaaatggcgaacgcctttttcatagacggcaaccgggaaaggacggcgagtcatcagcataccgacaacatgaaataagtaggtgagtttaccaagatgcagcctattgagcaattgcttactatcactacggttagcagcgttaacaacggcagcgtcaaagccaataccgatattattcacgaaatagccactttcgccgcgggtgcgttcatgaaatcgcccgatatcaatcgtgaccgcttctgtagcctgtaatacttgttccagcgcatgcatcggatcttcagacataccgataccgcgagcgaaatcattacccgatccggctggtacgtaagcaacaggaatctctgactggcgtgtgccagctaacccattgatcgcttgattcaaggtgccatccccgccaatgactaacaaaaccggatgctcacgttgattgaaatcaccaatttgctttgtgatcacgttggtatgtccgggatagcgggaagttttgatggcataagccaaatgacgctgatccaaaacggccttcacttgtttataaattggaatcgacgaaccaccgccagccgccggattatagataatataataaaaaacagccgtcatcagctttcctcctaatagacacgcactcaattataccgaaaataaggcgaaaaacaatggaacagtgacgaccttattgtcatcaaacgaacattttttgaagaggcagatgactacaaaccagcaaagtgtcggtccagcacctagcaaggcgataacaggattttaatcatgatttttggcaaaaaatgctaataaaaaagccactcgacaagcacctaagtggttgtcgcgtgactgttaatcattttcagttaatgagtgacgttgccagctatctgaccggaatttagagcaaaatcagcatcggtaaaataaccgggtgtcgttctgttttgtcgaacaaaaattcttgcaagttgctggtgattgcatcttttaagctagcttccgtcaccttttcactgcttgagaaggttgacttaatggtgcgatagacgcgccgctgagcctgattaatcaactcgccggattcacgcatatagatgaagccgcgagaaagcagatcaggaccagctaagaccgcttgtttttgcatattgatcgtggcaacgaccacaaccaagccttcctcagacaacatgcgccgatcgcgaatgacagcattaccgatgtcgccgacaccattaccatcaatgtaaacatcgccagcagggaagtgacctgcaattcgagcactatcttgcgtaagggctaatacatcgccattttccataatgtagcaattcttttcagggacgccgcattgttgggcaagttcgcaatgaatcttttgcatccggtattcaccatggcaggccataaagaattttggcttgattagccgcaacataagcttctggtcttcttgaccgccatgaccggaagtgtggacgttgttgaccttgccatggatgacctcggcaccagcttcacttagctgattgatcacgtgattaacactgacagtattgccgggaatcggattactggagaagatgacggtatccccaggttgaatactgatttgtcgatgcgtgccattagcaattcggctcagcgctgccattggttcgccttgtgaaccggtacagaggatcatcactttatcagctggcatcgaattaagttgatgggcatcaatcaagacgtcatcagggatgttaaggtagccaagttcgcggccattgaccatcgcagtttccattgaacggccaaaaacagcaattttacgaccgtgtgccattgccgcatcagctgcttgggcgatccgtgaaatgtttgacgcaaaggtggcaaatatgatgcgaccatcaattcgatcaaaaatgtggcgaattgacttgccaacaaatcgttctgacttagtaaatgtcggtacttccgcgttggttgaatccgacatcagtaccagcacgccttcttcggcgaaccggcacattttttggaagttaggggatggctgatcgccaaccggcgtgagatcaaacttgaagtccccggtttgaatgacgatgccttgcggtgtatgaaccgcgatgcccagcgtatccggaatactgtgggtcgtgcggaagaactcaacactaagttttttgaacttcaacacggtgtcttcgttaatttcagttaatttggtagtgcgtaacaaaccgtgttcttcaagtttgccacgaatcaaagctgctgctaacggaccagcgtaaattggcacattcggtacctgctgtaagaagtagggaataccaccaatatgatcttcatgtccgtgagtaataaccagtgctttgatcttgtctttgttttgaaccaagtaggaataatcggaaatgacataatcaatcccaagcagatcatcttcagggaacttgatccctgcatcaatcacgatgatttcatcttggaattgaaccccgtacatgttcttcccaatttcacctaaaccgccgacagcaaagacggcggtttcgttattcttaatatttaatttcatataattagaaagttgtcagcttaaagttggctgacttttcctcgtattccaggaagtttccggataactcctggatgaattcaatattataaggcgtgttcttttcaacaagcgcacgcgcttcaaccgcagatggcgcctcgaggtaaagcgtctgggttgtttcccgtcgtggattttgaatcttgtctttctgatataagactttgtagatcatgatggactccttccgtggtacaaaaagaaaggaagtgcaacaaaacggcttccgaaaaaaaggacataccatcaagatggaaaaccacaacagacatggtctatcttattgggatggccgatatttctcgtcgttcgaacccgaaaacaggcatacctgcgctatttcgtcgttctatttctgtcacaactcctaaatactttatgaccgatcgatttgttgtgaaaacaacagctagcaacagtctatcatatttgaaacggtgtgaacagaccagagcgtgaaccagcccggttagaaaaatcggagtgtaagtgctactcaacgtgatgtccggagtgaggctattgcgttcaaggttgttatacgtaggtttctgaactggcgaccgcggttatgcggcaattgtaaggtctatccttgtggtgctaatgcggctggcacactgatcctagtactctcttaggaatcaaaccagatgatgcccacgagtttatgaccagctattattgtcaagctaacctccgattgcaagaatcacattggcgatagcatggttgttctgggtataataaaggtaagaatcaataacatattggcttttgaagggagtggacgttgtggtctggcttatcgttgttctagttctgatcgtgctcatcgttttgtgggtgctcaggaagcgctggcggcgtaataaagcaatccaaattctgcttcatcatagccagcgactaagtgatcaggtcatggatgctgctttaacatcacttaaaatccctgtccaagaacctttgacttcaaaaccaattacggacatttggggtcatggtgtgatggcgttctcctatattttccccaagagcttttccaccattgatcagcatcaattagccgacgctttgcaaaaagcggctggagaattggatattgccagttccgatccggcattaccgccctttgtgatcacggattactttgaactagaggggcagcaacatgttgatctcgcttttattgctaatgaggctaccatagaatatgtccgcgatgtgaatcgcgttgcttaattttagaaagtgccgaatggaggggttcaagtgaacgatgatcaggatttattgatgcgtcagatcaaaagttttgcccaaggattaggcgctgcgatgagtaagaaagatcgacgcccagatgatccagtcgtcgttttccacgatgcggaagtcagcttggccagctatcaagcaaaactgataaccgaagtgaaggaaaatggcttttcggcagctaaagcacttttgacaacatggcgggacacccgcttatcgcgacgacagtacgaagacttaacggcatggttgcagggacaacgatttgtgtataaagaatcgtaagttgggtgaaaaatagtgtcaaaaaaagaaggctttaagccttctttttagtacaagcgtattttacttgataatgacggcatccgggtcgatggtgaaaggatgttccttattaatatgatcgtaaaacaggacgccatttaagtgatcgatttcgtgctggcaaacgatagccggatagttcttcagacgaatctttttatgttcaccggcttcattttgataactgatggtaatccgatcagcccggacgacatatccgggaacatccttatcaacggacaggcaaccttcgccttcagccaaagcagcatgttgaacgctgttgctgatgatccgcggattaatcaaaacttctttaaagaggatttcattatcgtcaccgggaaccaaaacagcagccatcgccttgctttgcccaacttgtggcgcagctagtccaacgccaggacgcaaatgatacttttcgttttgttcttcatcttggctgatgaccaagtaagccatcatatcatgcgccagttgcttgtcctcgtcagaaagtgggaacgtgactggctttgccgtttcacgcaggaccttggccccatcgcgcgtgatatccttcatcaaatacacaatctgtacctccgttcatttcttctactagattagcacaggaccagaaggctgaaaagcttcgcgtgcaagaggtttgccttaaatgctgcaatagcagaaactttttctgtgtctgggtgataagcaagaaaaaaactatttttgaagctttgctcattttcaaggaattcacgctatttcgattcataaagttacagaaaaaataatagctctgtatcacttacaaagacaaatacaaaatgttttttgtctaattgatgattcgcaagttttatgttctaaccaacaacctttttgaatcgccatgattgttcagctgtgctcgattcggtgaaacatttgacattcggttttttttaccctactatatagaaggttaaacaaatacggtgctttccgttaggtgaggctcctatacgaacaatgctgctgctcagaaacatcgagagatgccaattgagtcaactgcgtctgcccattaaggcttacgctaatgcagctgaagctcgcttctaggcgtatagtgctaaaactaaacgattgggatgctttttctgcacgctctcaatcggcgtgcaatttttttgcctaatgaaaagctgaggaaaaggtggtgagcataatggaacaatcttcaaagagtagcggtagtagtagcgatttagctgatcccggaaggcccattgtgctgccgctacgatctcttaagtgaaattaatggatttggcagcatcgcggtccttctcgggaaacgggaaggagtttgtcgatgttgatgatggtttcgagtggcctgtcacgctacgaagcgcaaaaggcccaacaaacagttacaccacgtcctaatacgatcaacaaggcaagtctcttcttaccgttgttgatcatgactgccggtgtcagtggcttgatcagtgtgatcactcgcaactggcttcttacagttgttatcggcgtgttgcttagtatgatgatggctgtgatcgtttatctgctcacagctgctacccgacatcagggcgatcccaaacagacggttttggttgtacgcgagggcttggttcgccaagtgagcgcaaatgaccttgtcgtcggtgacgtgctgatgttgacgacaggagaaaaactgcctgttgacgttgcgttggctcccgatgcacacgtttccttgccaagtgatttggccgggctgctggctttgattggtcggcaggtaccagcgggggtaggcattgctggcgctgtgatggcgaccgatgcccaagcaaccgtcacggcggttttgcgtgatggtcttgtcgaccatgcctttgcacaattgaacggaaagacggaaaatcatgcgccagcttcacttgtaacgagtgcggcagttggttttgtccttgcgctaaaacagatttttcgggtatccggcattgctgtatcactcctggcaagtgaattgttaagaagtaaacaagtaaatcgtgcacagcaggttcggttacatgccgaccttgcccaacacgccaccttggttggcgccatgaaacatcacagtaaaacaagtgattttcggcacaaccaagatccggtctcgtgaagcacgatgaatgaatccattaaaagaggcacgcgcttgtgaagcgacgtgctctttttgtgtcttattttttataaggttctgttatagtcccattcgttaaaaaatgaggcacaacaagctcggaaaaggattcccgccagtgctgaaataaaacgcttgcaaggataaaaccgcaatgttacgcttggtttgtaaagattttcattagtacagttttcctgcgttaatgacaacaggaatggaaagaggttctgattatggcaaaacagcatgctgcagttgatttcaagaaactgttggaaaatcaagatgccgattttaagccgaccatccaaattctggatgaagcgggcaaggtcgtcaatcctgatatcatgcccgatctgagtgatgatcagttggtcgacttgatgtccaaaatggtttggcagcgggttcttgatcaacgagcaaccgcgttgaatcggcaaggacgattaggtttttatgcgccaagcgctggtgaagaggccagcatgattggcagccattcggccatgaaaacaacggactggttgttacctgcttaccgtgacttgccacagttgattcaacatggcttgccactggataaagcattcttatggtctcgtggtcatgttgccggtaatgaatacccagaagattttcacgcgttaccgcctcagattattattggtgcgcagtacgtccagacagccggcgttgcactcggcttaaagaagaatggcagcgatgaagtagccttcacgtataccggtgatggtggcacgtcacaaggtgatttctacgaaggtgtcaactttgctggccatttcaaagccccagcaatctttattgtgcaagataacggctttgcgatttctgtaccgcgggccagtcagacggctgcgaagactttagcgcaaaaagcagttgctgctggtattccaggtgtgcaagttgacggtatggatgccctagctgtctatgaagtgacaaaagaagcgcgggcatggaccgccgctggtaatggccctgtcttgattgagacgctgacctatcgttatgggccacatacgttatctggcgatgatccgacgcgttatcgttccaaggagacagatgagttatggcaaaagcgcgatccgttaattcgaatgcggaactacctgactgataagggactttggaacaaagacaaggaagacgccttaattgatcaagttaaggatgaaattaaggacgcaattaacaaagctgataaggcaccacagcagacggtatcccgcttcctaaaggacacgtacgagaccgcaccgcaaaatgttgctgaacagctggcagaatttcaaggaaaggagtcgaagtaaccatggcacaaaaaacaatgatccaagccatcacggatgcgcttgatgttgagttggcgaacgaccctaagaccttggtattcggcgaagatgtcgggaaaaacggtggtgttttccgtgcaactgatggtttgcaagcaaaatacggtgaggatcgggttttcgataccccactggcggaatctggcatcggcggtttgtcgattgggttggcattgaccggttggcggccaattcctgaaattcagtttttcggattcgtttttgaaacgatggacagcattggtggtcagatgtcacggatgcgttaccggatgggcggcactcgctcaatgccgatcacgattcgggcgccttttggcggtggtgttcacaccccggaaatgcacagtgacaactttgaagggttaattgcgcaatttcctggtatgcgtgtcgttattccaagcaatccatatgatgccaaaggtttgctgattagttcgatccggagcaatgatccggtattgttccttgagcatatgaaactatatcgttccttccggcaagatgttccagagggcacgtacacggtaccgttggacaaagcggcggtgacccgcgaaggttcagatgtatcgatcatcacgtatggtgcgatggttcgcgaagcactgaaagctgctgataatttagccaaagatgggattcaggctgaaattgttgacttgcggacaattgcgccacttgatgtcgaaacgatcatcaattcggtcaaaaagacgcataaggttgttgtggtgcaagaagcacaacgcatggccggtgttgcatcaacggtgatcagtgagatttccgaacgggcgattctgtcgcttgaggcaccgattggtcgggttgccgctccggataccccgttcccatttggccaagctgaaaacatttggctgccaaatgctaaggatattgaagctaaagtccgggaaaccgttaatttctagaaagaagaggtgccaacatggcttttgaattcaaactgccagaacttggcgaaggtttggcagaaggcgaaatcgttaagtgggacgtcaaacctggtgatgacatcaaggaagacgataccttacttgaggttcaaagtgataaaagtgttgaagagattccatctccggtctccggcaaaattttaaaaattcttgttccagaaggggaaaccgcgtcagttggtgatctattggttgaaatcgatgatggctccggaccggcagctgcacctgcgactgcaacagcagcccctgcgacacccgctccagcaacgcctgctgtgcaacctgcacctgcgcaatcggtttatcagtttaagttacccgaactaggcgaaggtttggcagaaggcgaaattgttaaatggtcagtcaagcctggcgatcaaatcaaagaggacgacacgctgttagaagttcaaagcgacaagagtgtcgaagaaattccttctccagttgccggaacggttgttaagattctggtaccagaaggcgaaaccgcgacagtcggtgaagcgctggttgatattgatgcaccgggtcataatgacacatcggttgctactgaggctggcgctgcaccgcagccggttgctgcaacaccggctgcgacgccagctgctgcaacaccggctgcgacgccagctgcaccagcagcgggtggcgtgacggccatcaccgatccgaaccgggaaattttagcaatgccatctgtgcgtcagtatgcacgcgaacagggcattgacatctcacaagtgccagcaaccggcaaacatggccgaattaccaaggctgatgtcgatgcattcaagacgggcgcaccagctgcatctgcacagccagcagcccctgctgctcaggcacaaccgcaaccagccacagcaaagccagctgcaccgccagcaccaaagccgcaagcagttgcaccatacgtttcgagtggtaatgaagctgaacttgaaacccgtgaaaagatgaccccaactcggaaagcgattgctaaggcgatgcttgcttctaagcaacgtagcccgcatgtgacgagttttgatgacgttgaagtttctaagttaatggctcatcgcaagaagtacaagcaatacgcagctgataagggtatcaagttaaccttcctgccgtatatcgtcaaagcacttgtgacggtgttgcgtgaatatccagaattcaatgcgtccattgatgatacaacggatgaaattgtctataagcattacttcaacattgggattgcaacaaatacggatcacggcttgtatgtgcctgtgatcaagaatgccgatgcaaagagtatgtttgaaattgctaaggaaattagtgaaaatgcccagaaggcttatgacagcaaactaaagccggatgaaatgcgcggtggctccatgaccatcagtaacgttgggtcaattggcggcggctggttcaccccagtgatcaatcaacctgaagttgcgattctcggagtgggcaaaattgctaaggagccttatgtcaacgaagacaacgaaattgtggttggcaacatgttgaaattaagtttgagctatgaccatcgtttgattgacggcgcgttagcacaaaccgccttgaatctgatggataaattgttggcagatcctgatctgctgttgatggagggataagcatggttgtaggcgattttgcaatcgatttggataccgtcgtcattggttccggccccggcggttatgttgctgcgattcgcgcagctgaaatgggtcaaaaggtgaccgtgattgagagcacgttcattggcggtgtttgtttgaatgtcggctgcatcccatcaaaggctttgatcaacgcaggtcatcgctatcaagacgccttggaagcaagtacgtttggcattaatgccaaaggtgctgaccttgatttcacgaaaacccaggaatggaagcaaaataaggttgtgcatacgctgacaagcggtgtgtcgatgctattcaagaaacacaagattgacacgattatgggcacggcgttcttaaaagatgaccatagcctgcgcgtgatgcaaaaagattcagctcagacctatacgttcaagaatctgatcatcgcgactggcagccggccaatcgaaattaaaggctttaagtttggcaagcgcattttagattcaacagggggtctgaatcttcctgaagtaccaaaagaatttgtcgtcattggcggcggctatatcggctccgagttggcgagtgcgtatgctaatcttggcgcgcatgtcacgattcttgaaggcacaagttcgattctgccaaactttgagaaggatatggttcagctagttctgaattccttcaaaaaacgtggcgtaacagttattaccaatgcgatggctaaagaagctgaagacactggcaaaggtgtcaaagtgacgtacacggccgatggtaaggaacagacgattgccgccgattatgttatggtgacggtcggacggcggccaaatactgacgatcttggtctcgatattgtcggggtcgaaacaactgatcgcggtttaatcaaggtcgatgctcaaggccggaccaacaaaccgaatatctatgcgattggcgacattgtgccaggtgcagcattggcgcataaggctagctatgaaggtaaagtcgctgctgaggccatcagcggcaaagccagtgcggttgactacaaagcgatgcctgccgtttgcttcacggaccctgaacttgcaacaactgggatgacagttgccgaggcgaaggataaagggatcaaggctaaagccagcaagttcccatttgctgccaatggtcgtgccctcagtcttgcccagacagaagggtttgtccgcttggtcactaatgaaaacggtacggttatcggcggccaagttgctggcgccggtgctagtgatttgatttccgaactgaccgttgctgttgaaggcggtttgaacgttgaggatcttgccttgaccattcatccgcacccaacactgagtgaagttatcatggatgacgctgaagttgcattgggactcccaatcaatatttagtatctgatagagatgtcatgaggcagtctgatctccttgatcaggctgtttttgtgtcatttggttatcgctaatggtgaatgctgtgagcatggcaacagctaatttttacaagaagatgagaaacggctaatatttcagttagttaacaattgcgtctaaacccctttttaattttgtcttaagattctgcttccgttaaaatgtaactaatggagtggaggggaagggttttcatgcaaagagtcgtggtgagcggtgccagtatcgggacccaagggcttttagaaacattgattgcatcacagttgctgttgacggtgggttgttatgaaccagatgaatcattgattgatatggttgggttgacagctttaagtcaaatatgtcaaaacacatttgcaaaagtcacgccgaaagttttaaaagcggcggatattttaatcttgaccgatacggggtcacctgatgccgatgattttattgagacgaatattgcggcaattcgcaaagttctcaattcagcgatggcggcgggcttcacaggtagaatcattgttgcgatgacacgtgatgaactttttacgtattttgcgcaacgtttttccggagtgaataaaagtcaggttgttggacttggtacgttcggtgcaacgtggcgatttgaacaatttctggctgctaggttggcagtaccggcgaaacatgtgacggcttatgtggtaggtacgcgacaagccccagtgttgatttggagccgagcttacgttggtgcaacgccggttttgcgcttattaaatgatcagacgatttttactgatggcttggatgcggttcgaagctttttgaggagtcccttgactgtcttgcttgggaggttggtgattccgattattgcggcgtatagtggcgatagtttgattggcacgctgacgcatctgatggatgtagaggatgacacaggtcaggtttatagttcgccagtcctcttgaatgatagcggcgttgtgacgctcgccacagttgctggttcggatgatgaggaagctgcgttgagtcaaacgaaacaaactgtacaggatcaaattaaggcgatagaacaaggagctagtaaacatgaaacctaattatgcctatccactcgacattgactggacaactgccgaaaaagtaaaagtcacgaccttttataccttagtcgaagatgcatatgaacacggtgttgatcgtgataatctgcttgcagcgtaccgtggatttaaggaagttgtgccagataaaggaaccgagcgcaaattggatcgggagtttgaagcactgtccggttattccatgtatactgttatacagatggcccgcaaaggcgtgagccaaaagattagggtaagggtgagttaaccatgacacaagatccagaaatgttgcggcaaacgattattagctggtttgctgctagtcgcaaacaaattctaaccgcaatggccgccccattagatgttgccaccaaaagtaatcgcaacgatttggtcaccaatgtcgacaaggcgaatcaacaatttttgattggcaaaatcagagaggcgtatcctgaagccggtatcattggcgaagaaggacatgagcacgatgacactgatttagctggtctcgtcttctttgtcgatccaatagacggcaccatgaatttcgtcaaacaacaagcacattttgccattatgattggtgtttatcaggacggtgaacctgttgtcggcgcgattatggacgtcatgcgaaatgaagtgcttagcgggggcccaatgattcccgtcacccatgctggacaacaagtgaaggttttgccagacttgccgcttaaagatggcttgttaggtgtcaatggtccgatgacgattaagaatcggttgcatctaggcgatatcgcgttgaccagttctggcgctagaatgagcggcagtgcaggaatggaattcatcgaaattgcgctgggtcgacagatcgggtatgtgtcttacttacagccgtgggacgtagcggctggaatggcgattactaagggtcttggcgttgttttcagccgtgaagatggcgcaccaatcaacttgcagcaaccaggcgttgtggttgctgctacaccaaaggcacatcaaacgattttgacgatgatggcggatggcggcaaagaggcttaagctaaaccaatagacaaatcatgatttctggcgcaaactaagtggcgccagtttttttcttaataaaagggtcgcgtgatagcccgctttataagaaaatgcaatgtctgtgattgcgtgaagcacttcacttttcagaaaatccagacagacttgtcattgtgtgttataatttcaaatcgtataactgtgtcagttgctggcacttttttaatgcggtaggcggccagtagtgccagcagaaaggaagtataaatcgtgaaaacacgtgacgatattcgcaacattgcgatcattgcccacgttgaccatggtaagaccacattggttaacgaaatgcttaaacaatcagatacacttgatcaacacattcaattacaggatcgggcaatggataccaacgccattgaaaaagaacgtgggatcaccatcctgagtaaaaacacggcagttaagttcggcgatacgaccatcaacatcctcgataccccggggcatgctgactttggtggtgaagtggaacgagttatgaagatggttgacggcgttttgcttgtcgttgacgcttttgaaggcccaatgccgcaaacgcggtttgtcttgaaaaaggcgcttgaacagcatttgacaccgatcgttgtcatcaacaaggtcgatcgtccaggtgcgcgccctgaagaagtcgttgatgaagttctcgaattgttcattgaattgggcgctgatgatgcacaactggaattcccggttgtctatgcttccgctgtcaatggcacttccagcatggattccgatttgtcaacgcaaaagcacaccatgaccccgttgtttgagaccatcgtcaaaaccattccggcacccatcgacaacagtgacgaacctttgcagttccaagttgcgatgcttgattacaacgattacgttggtcgaattgggattggtcggattttccgcggcaagattaaaatcggcgacaatgttaccgttatgaagctggatggttctcaaaagaacttccgcgtgacaaaactctttggtttctttggcttgacccgaaccgaaatcaactctgctaaagccggcgatttgatcgcggtttctgggatggatgacatcttcgttggtgaaacggtgacggcagctgatacgccggaagctttgccgattttgcggattgatgaaccaactttgcagatgatgtttgttgcgaatgacagtccatttgcaggtcgtgaaggtaaaaatgtgactgctcgtaaacttgaggagcgtctgaagtcgcaattgcagacagatgtgtcgctgcgcgttgacgacactgatcaggcaggtgcctggatggtttccggtcgtggcgaattgcatctttcaattttggttgaagagatgcggcgcgaaggttttgaattgcaattaggtcgtcctgaagttatctatcgtgacattgatggtgtcatgatggaaccgttcgaaagcgtccaaattgacactcctgaacaatatactgggacagtcattgatgcgatgagccaacgtaaaggcgaaatgcagaacatggagaacgaaggcaacggtcaaacccgtttgacattcttggcgccttctcgtggtctgatcgggtactcaaccgaatttctctctgctactggcggttacggcatcatgaaccataccttcgaaaaatacgctccggttatcaagaattgggaaccaggccgtacacaaggtgctttggtttccatcaacgctggttcagcaacgacgtacagtctgcaatccgttgaagaccgtggccagttgtttatcaatgccggcaccgaggtttatgaaggcatgattgttggtcaaaactcgcgtgaaaatgacattgcagtcaatgtcaccaaaggtaagaacttgaccaacacccgtgcagccgggaaagaccacgcagcagccatcaagacgccaaaagatatgacgcttgaagaatccattgaattcttgaatgatgacgaatactgcgaagttacccctaagaacattcgcttgcgtaagaagatccttaacacaggcgaacgtcaaaaagcggctaagcgcaagaaaattgccgcctccaagtaaataagttggtcaaaaagtcgtctgtaaaaggcggcttttttgatgtcttgatcacaataattgtgattgttagacaaggcttaacttgtcgactgagcggttgttaaatcagcatgtattggtgtaaatgaccgcctgaaaaaacagtttttagtgattaccgcagaacacggcttggagcgtgaaggcgatatgctataattagtccattaattgcttgaaaggccgcgttttcattgatgaataaattacggcacgtggattacttcatattagttccgtacctcgttttatgtgcgatcggtattgtcatggtgtactctgccagcgcttattgggttcaacggcaatatggcgttgccgaaacgaaatacttgattcaacaggcactgtttgtcctgctcggtatcgcgactgtgtttttcttttataatatgtccttgaaggtggtccacaatcgttgggttctgttgactttaatggccggactagttgtgatgctgatctatctcattgtgcacggccgcgccgttaacggggccgctgcatggatcacgattggcgggtttcgcttacagccatcagaatttgctaaaatgattttgattttttatctggcgcacatgctgacatcgcgcgaggatcgctttcaacaagaggactttcggctaaggcagatgtggcagccattgtttgtcgctggtatgatcatgcttctggtttttgtcgaaccggataccggtggatttgccattcttttcttgattacattggtcgtggttatgtccagcgggataccgatgcgttacggttttttgtgggtcttgatgttgatcgcgatcacagcactgggctactacatcgtgtcgcattatcattttcccggattggagaagaattacggctatcaacgattagtggccgccattcatccgtttgctaaagcgaatacggttggcaatcaggttgttaactccttgtatgcgatcaatcacggtgggctgtttggtgttggactaggcatgggcagccaaaagttaggctatctacctgagccttatactgactttattttggccgtgattgccgaggaacttggcttggttgggacatttgtcgtattgagtttgctgtttttcctgatcatgcgtttttatctgatcggaattcgctccaagaacacctatcacacgttgatcgcgtacggcattgccacgatgatgctggtgcaaaccgttttcaacgttggtgctgtgactggggttttgccagttaccggggtgacgctgccgtttatcagttacggcggttcgagtatgatcgtgctgtcaatggcgatcggcattatgttaaatatcagttatcatagtgaacgtacgcaacgaaaggtagagaagacgcatgcataaagttttagtcgctaatcgtggcgaaatcgccattcggatttttcgtgcctgtgaagagcttggtcttaaaacagtcggtatttttgctaaagaggacgctttgtcaattcatcgattcaaagcgcaggaaagttatcaggtcggagcaggaaaagcgcctatcgctgcctatttggatatggacgatattatccgcattgccaagcaaagcggcgcggacgcgattcacccgggttatggcctgctttcagaaaatgctgagtttgcccggaaagttcgggcagccgggctcatttttgttggcccgcgttcggaattactcgatatttttggcgataaagttgcggccaaggaagctgctcacaaggcaggcttggtgactattcccggcacgccggaaccaacgcgcgattttagcgaaattcaggatttcacagccacacacggttttccggtgatgcttaaagcagcatcaggcggcggcgggaaaggtatgcgaatcgttcgctctgaagctgaacttgaggccgtgtatcaaaatgcggtgaatgaagcgaaagctagttttggcgatgatcggatgtacgttgaaaagtacattgcctccgccaaacatatcgaagtccaagttcttggcgatgagcatggccatttgttgcacctcttcgaacgtgattgttcagtacagcgccgccaacaaaaagtggttgaaattgccccagctgtggcattgccaacagccttgcgggcgcgaatttgccaaagcgctgttgatttaatgcaaggtttgcactatgaaaatgccggtaccgttgaatttttggttgatggcgatcagtactacttcattgaagttaatccgcgggtacaagtggaacacacgatcaccgaactgattaccgatgtggatattgtgcagtcacagttaaagattgcagcaggcgccgatctttttgcagacttgcatttgccaaagcaggcagatttgcatgaaaatggcgcggcgatccagtgccggattacgactgaggatcctgaaaacaatttcatgccagacacaggcaccattaatacttatcggtcaccaggcggcttcgggatccgccttgatgtcgggaatgcctatgctggggcagttgtcagtccttatttcgactccttattagtaaaggccagtgttcacgcaccgaatttcaccgctgccgtagccaaaatgcaacgcgctttacatgaatttcaaatcaccggcgtcaaaaccaatgttgctttccttgagcacttattagcgacagaaactttccggacaggtgaagcagaaaccgcgtttattgatgcccatccagaactcttgcaagttcaggcaaagcccgacacggcttcgcggttactgtggtacatcagtgatgtcacggttaatgggttcaaaggtgttgaacgacaggcacaaaaatattaccctgaattgcgctatgatgttcattttcctgctgccaagccgcaaaaagatttagttgccttgctgcattctgacggtgcgcaaggggttactgattggattaaggcacaaaaccagttgctgttaacggacacgacttttcgtgatgcccatcaaagtctttttgctacccggatgcgcactcgagacatgttgacggtcgcacaggatatgggcaatggcttgccaaatcttttttccatggaagtatggggcggggcgacgttcgatgtcgcttatcggtttttgaacgaggatccgtggacccgtttgaaaaaattgcgggcagccttgccgcataccttgttacagatgttattccgtggcagtaacgcggtcggctatcaaaactatccggacaatgtgattaaagctttcattcaaaaagcagctgacgatggcgttgatgtttttcgaatttttgacagtttgaactggttgccacagatgacgctcagtattgataccgtcaaacaaacaggcaagcttgctgaggcgacgatgtgttacacaggcgacattctaagtcatgcccaccctaagtatcagctagcttattatgttgatctggccaaacaattagtggcagctggtgccgacatgcttgcgattaaagacatggccggcttgttgaaaccgcaagcggcgacagagttagtaacggcgctcaaagatgcggtcagtgtgccgattcatttgcacacacatgacaccactggtaacggtatcgcgacttatgtagccgctgctaatgcgggggtcgatatcgttgatgtggcgcaaagcagtttttccggaacgaccagtcagcctagtctagaaagtctttactatgcattaagtggcaatcagcgacagccagatgttgccattgaaaaggcgcagaagttgaatcgctattttcaggcaatcaggccttactatgccgattttagtaatggtgtgacgggtccgctaacggatatttatacagtccagatgccaggtggccagtatagtaacttgcagcaacaagcgcgtagcatggggataacggattttgaggccgttaaaacgatgtatgctcaggtaaataccttatttggcgatatcatcaaagtaacgccatcctcaaaggtggtgggtgatatggcgttgttcatgctgcaaaatcacttgacacccgatgaagtgttggcgcatggtgagcaatatgatttttcggcctcggtcgtggcattctttaaaggcgatctcgggcagccggttggtggttttccgaaagcgctccaagcaaaaattctgaaaggacaaaaaccgttgacggtacgtccagggcaattggcgaagccggctgacctgaaggctgttcgcgcggcgttagtacaagccgggatgaatgaacccagcacagaagacgttttgagtgcaattctgtatccggatgtctttaatgcatacgcccgcaagcaacggcagattggaccggtgacgaagttggattcgccatcgtatttccaaggaatgcggataggcgaaaccgtgtctgtgccgattaaagcaggtaagacaatgattatccagctcaacgcgatcggcgaggcggatgcaagtggtatgaagacgctgtactttactgttgatggtcaaaagcaggaagttcaaatccgcgatgcgcatcagaagagcgcggggttgcggcatcagttggcggaaccgactgatcgtaatcaaattggtgcaccgatggcagggaaaattgtttcagttgccgttaagtccggtcaagaagtggcacaaggggatgccttgtttgtcattgaagccatgaagatggagacgacggttcatgcaccatttgcaggtaccgtcactcatctttacgtggaggcaggcgccttaattaagagtcaggaactgctggccaagcttcaacccggtgtgaccaagcagtgagtttggaaggtgaaaaaatgtttgctatcaaacagcggcaaggacttgtcgtttgggtgtattccctcaaacaattaaaaacgctgcgtcgatatggcacgattatgtatgtctcgcgccgcatgaagtatgtttatctttatttggatcaagacgagttggctcagacaagcgccaaactcagtaaattacgatttgttaaacgtgttgagccctcccatcggccagaattggcgactgaattcggtagcaacatcggccaatttaagccgactgaagaggatcttgaggtgaaagccaagccaaaacgtcgcttgcggccaagttcggctggcgatgagacatcagtaggtgatcacgatgcgcgtcattagtggagcatttcggggattgcggctgacggcagtggcaggtaaccaaacccggccaactgcagataaagtcaaggaatccatgtttaacatgctgggaccatactttgacggcggacaggcactcgacttgtatgctggcaccggtgcgttgggcattgaagcagtctcgcgtggtatggttcacgcgacgttggttgatcggcagtacgccgcaatcaaaacgatcaaaaccaatcttgcactaaccaaacagcctgagcacttcaccgttttgaagcaaccggtcaataaggctatccgccagtttgcggaagctggccaacagtttgacttaatcatgatggatccaccctatgcgcaacagcaagtattggcacaacttgcggcgtttatcagtactaatttgctgcggccaggcgcacgtgttttagttgaaaccggtatggatgtgacttatcctgatgagatccccggctacatcaagctacggcgccaaacctatggggtggcgcaggtcttaattttagagcgaagcgaggaaaacaatgactaaaaaaattgcagtgtttcccggtagttttgatcctttcacgaacggtcatcttgataccgtcaaaagagctagtcggttgtttgatgaagtggttgtagcagccatgaccaacacgagcaaaaagccgcttttttccagtgaagagaaattggcgctgatcagtgaaagcaccgctgggctaccaaatgttaaagccatggcagcgcctaaacgattaacagttgaatttgcccggtcaatcggtgcccagtttatgattcgtggtatccgcaatgtcgcggactttggttacgaggctgatattgcgacggtgaatcatgatctcgatcctgaaatcgaaacagttttcttgctggcagacaagcaatatgatgccttatccagtaccatcatcaaagaggtcgcggcctttggcggtgacgttcatcgttttgtgcctgcgcctgtcgaagcagctttgtatgcgaaactaggtgacgctcatcaaaccaagtaatcagaaacgtcggcgctggcgttggcttatcggactgttaatagcagtcgttttgttggctgtcttctttttgatcccaaccaattactatctagaagtgcccggttcagcggaatctttgaagccgtacgttaaagtcagtggcaataaagatgatgccaagggtgcctatatgttgacgacagtgggtgtcgtagggccagcatctccggcattacttctgctcagtaaggtgcaggcgcacaccgatattgtgtcgaaacaggatctgatgggcaatgatagtagcgctgagtatgatcagctgcaagcctactatatgaaaagtgccgctaataacgcggttgcggcagcattcaaagcggccaaaatgccagtgaaaacggaacatttgggtatttatgtcatgtccgtgctgccgcagtcgccattcaaaggtaagctggcgttaggagacacgattaccgaattgaatggccagcactatacaaccgctgatgcctatgtcaatgcgatcaaatctaaaaaggtcggatcaagtctgacactgacataccagcacaagggaaagaccaaacaagcaactggcaagctgatgcggttaccgcaaacaaaacgggcgggtattggtatcacactgacggagaacacggcggtcacaagtgaaccgaaagtgactattgatgccggtaacatcggcggaccgagtgccggtacgatgtttgccttacagatttacacgcaaattacacaccagaatctgcggcggggagcagtgattgccggtaccgggacgatcgatagcgatggtaatgtggggcaaattggcgggattgataagaaggtggttgctgccgatgccaaaggcgcaaaactcttttttgcccccaatcagccagctacaaaaaagctaaaacattatgatcccaattacgtcaacaactacgctgaagccgtcgaaacagcgaagcagattaagaccaagatgaagattgtcccggtcaaaacattgcaagatgtcattcgttacatggaaacttatgcaaaatcagcatcataagcgcttgccagttgatcgaacattggcatgaagagatggtgatgatgaagaactgccaaccaaggcagttctttttttcttggcctgcgtaatgtgttggtgaggtgagagagatgacgacacttatgttttggttgaaaacttattggtatgtaccgctggtggtgcttgtcggagggttctttttctggcagcaaactaaggcagccccagcacaatcccagctggccgttagtgttcacaccactcgcagtcatgcatctaatgttcatggtcagtcgaccaccatagcgtccagtagtcagacaagaagcagtaccagccgaccaacccgcggatttgtgcatatcaaaggagcagtccaaaagcctgggttatatccggttcgtgctgatacgcgttgggatgcggtggttaaagccgctggtgggctcacagacaaagctgatatcagtcaggtgaatttagccaagctagcggtggatcaagaaagtcttcagattccagagaaaggtggcgctgttgccaccgcgccagcttcagggactgccagcactggcggcactgctggccaaacaaatgcgactgctggtagtcgtgcagttgtgaatctaaacacagctgatgttagccaactccagacaatcagcggcatcggtccgaaaaaagccgctgacattatcagttatcgcgatagtcatggtggatttaaggatgtggccgaattaaaagaggttcacggcattggcgataaaacgtttgagactttagcacctcagctaacggttggcccatgagtggtcggtttattttaatggcagcaggtttgcttgctggtatcttgattggcattgggggatggttgccagcttgtttattgttgctttggctactcgttaaaacgactcgcaatctggtcatagtcgtaagtttggctattctcgttgggttaggacgtggtttgattgatgcccagcagtggcggcaaccgcctgttccccaaggatcaattgtgatccctgcgacagcactcaaacttaaagaaggttacgcaagttttactggtcgagcagctaatggggtgattgttagtggtcgcggcagtgtcaatcaggccgtcgctgcccgactaaaatcaaataatcaaccactcgtgctgcaaggtcagcatcaaataaaacgtctagcgccggcacgaaatcagtttgagtttgattacgcgacttatgtttggcaaacacagcagttagcctacgagttagtgaaaccgcaattgaatttcgagtcaaggtcgccacaaaatatagcagagctagttgatggttggcgggttcatttatttgactattttgagcaattgccaacaaaagttcgtcaatatgcaaaaggcctatttctaggccaacttgatgaggactttttgactcagcggcaagctttcgttgacttagggatctttcacgttttctctgtttcagggatgcatctttttgcaattactgctggtttatactggtttgcggcgcgcttgcgagtgcctcaagggttagttgatctgagtcgaatcgtcctactgccgttgttgttactcctattgccacttggtgctggattgtggcgcgcagtttggatgcgattggccggtattgtgaatgatcatttgcaacttggcttcagcgggcttgacttatttagcttcgttttaatggttaatttattttggcaaccgcgggttttgttaaccatgggtggtcaactaacttatctgttaaccggtttattagtggcgcttcctgccatgcgttcgtggcagctcaactggcgactggtacttgccagtatgccagtgattgcttggcacacgttcagcttcaatatattgacggttctttttaactggctgttaatgccgatctttgaacttggggtcatgccagggcttgcgatcgcgttgctttgccacacgccacctttgacgatggtttgcaattgttggaaaatggcttagttagtttaagccgtgtacctggccaaatagtcactggcgcttttccaagttggttagcacttatcggtattgtcgtgatgctgacggtgattgttgctaaacgctggttggcggcggcttgctggttcgtgactgtctttggctggtgttggtatcagccaaattatcgggtggtcatgtttgacgttggacaaggggacgcaattttgattgaaaccccttttcatcaaggtgctttgttgattgatactggtgggcgaattttcgggaagacgaccaatccacctgtccgacgagccattgtgccatatttgcatgctcgcggatatgctcggctggataccttattactgacgcatccggatatggaccatgttggcgatgccccgttgctatctcagctaatgccagtaggtcgactgatcaccacagcgacaagcgttcagcatcaaatgattcaaaaagttgccaagcaagtgcaacatgtgcagctcgtggcggctgatgactggttgcgcattggacccgctaaatttcaggtcgtatcaccgaaagcgcagacatccggcgatcctaccaagacaaacgccgattcaattgtgctctatggtaaaataggcaacagcagttggttgttaactggcgacgccgaaaaagaagcggaagaaaagaatatcatgccgcgtcagctaacggccgattatttaaaagtcggccatcatggttcgaaaacatcaagtaccccggcattgatcaatagcttgcatttaaaagcagcacttatttccgccggtgtcgataatcggtatggtcatccccatccagaaacccttgcaacgttggctgcagcccacgttccatgggctagcactagcgagcgaggaatgctgtgggttgagccggggcaaaacaaacaggaagatcagctttttggctggttaccaacaaaggagcaaagcagcaatgcaggtccgtgattttatcaaacatcttaagaatggcgaacgaccgccgctgacattgattctcggtgaagaatccgcattgcgtcagcaggcacaacacgcgatagccagcatgattccggaagatcaacaggccatgaactttggccgctatgatatgcagcaaacgcctgttggtgcagccttgaatgatgcgacctcgatgcccttttttggggattatcgggaagtcgttattgacgatccgtattttttgacaggcgaaaaaaatgccgacaaaatcgatcatgatcttgctggtttgcaggcttattttgagaacccagtaccgtcaacgatgatggtcatcatcgcgccttataagaaacttgatgaacggaaaaggttgaccaaggcattgaaaaaggcggcgctcattgtgaatgcagcaccgcttgatgaacgggaggcgcgtgctgctttagcccaaacatttaagaagcaccaagtgaccattgatgcaccggcattggatacccttgtgcagcgcactaacggccagtattcgatcatgatgggtgaggttcgcaaactgctgacctatgccagtgatggcagcccgctgaccgttgccgcggtcgaagccctagtacctaagcagctcaatgatcgggtgtttgacttggtgactgatgttttgcgcaaaaatgctgcggccgctttggcgctgtatcgtgatttattggctcagcgtgaagaacccattcgtttgaacgcattgatgctaggccagtttcgactattgctgcaggtgaaattattagcaaaaaaagggtatagtcaaggcgatattgctggcaccctcaaggcccatccatatcgggttaaattagccatgcggcaagtggatcgcttaccttatcagcagctcgcgactgcctacagtggcttggttgatactgaaacagcaatgaaaacgggaactatcgataaggcgttggcttttgaactatttatgctaaagtacacaggacagcagtctggcaagcatgtgcgcggttaagcaacatcgtgcggattgcaaatgatcgttagacgcaaaaatcccctcggatagaaacccgaggggattttatttggcatgacgccttaattacttgttaagtagtgcagaaagacgactcttgtcgcggccggccttgttcttcttgatcaggcctttgctgtttgccatgtcgatagcacgggcagcagccttgtaaagatcctgactgttgtcagcattttgttcggttgcggtcttgaacttcttaacagcggtacgcattgcgttcatttgcgcaatgttacgtacacgagcagcttcttgcgtcttaacgcgcttgattgcagatttgatttgtggcatgagatgttcacctccaacagtggattatgataaaactgcataagtttcaacagtcgctattatacagaaggcttgggggcaatgcaataaaaagttgtaaagggaaaatgcttgataggcaaaaagacttgcaatcattgggcagctccggtaaagtaagtaagtacttttgaacctgatacttagtttagcgaaccaccgacgctttactcagtttcaggcaatactcagaaaggtggtacacacaatggcaattgaacaaacacaaaaagatgaaatcatcaagcagtatgcacggcatgatggggatacgggttcacccgaagtccaaatcgcagttttaactgcagaaattttggccttgaatgaccatttgtccgttcataagaaggatcatcatagttacgttggtttgatgaagaagatcggtcatcgtcgtaacttgcttgcatatctacgtaacaaggatattacgcgttaccgtgatctgattaaagcattgggtctgcgtcgttaatttaactttgaaaggtcgccttggcggcctttttttgatggttacaaactagtctgattagaaagcggcgtgtgaagggcttttaaatgtagtctgggaaacgtccttgtgttcaagccttttaggtgtagactatttgcgactacgagcgcgttatgaaaaccggaatgccagacaaaggagtaagcatcatgggagcggaatatcgtcaacgttatgaggatcatttgttgagaatcacggttttagcagcgacacatcagataacggttgtctttgcagcaatggctgctgatcagtgggccgctgcggggatcactaaaaaaggagcagtacagaccgccgcagagggtattgcactgcctcttcagcaattagtgcaggcgattgcgattggcttaattggtaaaacaccaaccttatcgttgttgccgtcagagttgcaaaaaacggtaaccactattttacaaaatcgtgaactgctaatgacagcaacgccgacaggactgacgatcatgcctcaagtggctggtacaatggtggacttttggcttgctggtgataccgcgtttttaactgtaccggatgatcgcttgcaaccgatagatttgaaagcgtgggtgcaaaatatcctaccacaagctcatggcatgggcttcggcccagtaaccgggcaagcagcgttggcgatcctagccaacgaccatggcaaacatctagcagctggttgctcatcagaagttgcagtcgttttaatggcggatcatgaagtagcggcctatcatcttgacgcggcacagacgagtgatgctggctatcagacagccgttgcagcggccaaacaaaatcaccacgttgtgcaacgtttctttgagaatcacgtttagaaagaaacatctgtacttaggctcatttggcatgaagtctttgaaatgcatccaattgcgctctataggttttccttctgtcatgtggtacacttgtataagaatttattcggcggaagcgggtttgagtgatcatcattgccgcgcttccataaattaaccacgaggtgaaaccatgacgaagatcaatctggtcgctcttggtggggtacgtgaaaacggaaaaaacatgtacgccgtcgaagttgacgaccaaatttttgtatgcgattttgggttaaaataccctgataatgagttacttggcattgatgttgttatccctgattttagttatttaactgaaaatgctgatcggattgccgggattttcctgagccacggacatgcggatgcggttggtgccttaccatattttttggtggaacatcctgtgccagtttttggctcggaattgacgatcgcgatggccaaggtattcatgcaacatgatgctcaggctaaaaagttcaaagactttcatgtgattgatgagaagtcggtcattgattttggcgatgtgtctgtctccttctttaggacaacacatagtattcccggatcgttggggatcgatattgaaaccagcgaaggtcagattgtttataccggtgatttcaaatttgaccccagtgccacaccgatgtatcaaactgattgggcgcgcttggcacagattgggaataaaaaggtattggccttgctttcggattcggccaatgcggaatctccttatccaaatgctaatgaacatgaaatttatgatcacattaaagaaacattcgagtatcaggatggccggatcattgttgccggtgttgccagcaacattcagcgcattcagcaggttattaatgcggccgcttcgctcggacgacgcgtcgttttgaccggccgagatgttgaaaaagtagtcaagactgcaattcgcatggactacatcaagctgccgaatgaggacgtccttgctaaaaccaaggaactcaaagcgcttgccccagaaaaaacggttattttggaaactggtcgtatgggtgaaccgatgaagtccttgcaacgcatggcgacttctcggcatcgtttgattcacattcatgaaggtgatttagtctttattacgaccaccatcgcccatgccatggaaaccatggcagcacgtacgaaagacatgatttatcgtgctggcggagatgtgaaagtgcttggggatgatattcattcatctggccacgcctacaaaaacgatcttcagcttatgatcgacttgttaaaacctcaatatcttgtgccagtgcaaggcgaataccgtctgatggctgctcacgcggagattgcgcatgaagccggtatcccaactgccaatatctttattgttggaatgggcgacattttactttatgaaaaaggtaaaatgactgcatcgggtcatgttaatgcaggtaacaccatgattgacgggatcggtgtcggtgatattggcaatatcgttttacgagatcgtaaaatgcttgcggaagacggcattttcattgcagttgtgacgattgatcgcaagaaaaaacgcgtcgtatcaaagccgaaagtcacgagtcgcggattcgtttatctgaagaccagtcgtgatctgcttgccgaaagcggcacactagtgactgatacggtccaaaagaacttggacaacaaagaattcgactggacacatttgaagcaggatgtccgcgataaacttagtcgttttctgtttgaacagacgaaacgccgcccagttatcctgccggtcattatggaagttaatcaaaatagcgccaagcgccaataatcaaaaagaaaattcggatgaccatttccggattttttatttttgcagtgatgacacgctttctacagcacgacaggagggttcttatggcaaaaatggtttcattaccggataatgaaaaacgtcattttgacatcggcgagcaagctttgcagaagggcaattatgcttcggcagcggctcattttgaaaaagcctatgaagcagatcaatcgtatgcaattgcccaaccgttggccgcaagtttgaatggcttgaagcagtttcacgaaagcttaaatgtgatgttgccacactatcaagctttcatgcagacagacgcagacgttcagttaatgttggatgcctggttagggacactcaattttgtcatggcacgtggcatgttgcgccattttgatgcggtgcggcgtgctacttttgaccgacaaattgacgctgccgaggcacttgctttaagtagccatggtgaacagattgcttcattggtgcgaaaaatcagccatctcggcggcttttcgcggcaggagcagcaagatttgttcagccaaattggcattttgccaaaagcggcgttagttgaagcagctgtgcctaatttggccgatcaaacggttcctgttgcgatgcgcgtgtctttgctagatttgttgacaagtatcagttataaccaacctgtcagatatcaggcatatgaccgcattgaaacccttgtgccaaatgagttgcctggaatggcggaggaaaaaagcggaccggccattttgactcagttgcaagctgccttgggcgatgatgatcaggaactagggacggcattggttcagatggcgcgggtgcaaattgcctttctctatcccgatattgaccgtctgattccagatccagctgcattcgtccaagcttatttggatcatcaccaaggtaaaagcacggtatttgatcaactttttgcatggcagaccgccgaaacggcaaaattgtcggaacaggcgtaacgatacgttttcactgtaaatgaaagaaacttgacgctatctgtttacaaagtgaaattgaccatgtatactcattgctggaattcatttccagcgtagatatttgttttggtatttacgctcaaatgtagtacacttaaacgtaaaggattatcagggtacacaaggtatcctgtattcttacgaaaaatacaggaggttcgttttttcatggctgaaaaagaacactatgaacgcacaaagccccacgtaaacattggtacgatcgggcacgttgaccacggtaagactactttgaccgcggctatcactaaggtattgtcagaaaagggccttgccaaagcgcaagactacgcttctatcgatgctgctccagaagaaaaggaacgtggcatcacaatcaacaccgcccacgttgaatatgaaaccgaaaagcgccactacgcacatattgatgcgccagggcatgctgactacgttaagaacatgatcaccggtgctgcacagatggatggtgcgatcttggttgttgcggcaactgatggcccaatgccacagacccgtgagcatatcttgttggctcgtcaggtcggcgttgattacatcgttgttttcctgaacaagacagacttggttgacgatccagaattgatcgacttggttgaaatggaagtccgggaactgctcagcgaatacgattatcctggtgatgatattcctgttatccatggttctgctttgaaggcccttgaaggcgatccagaacaggaaaaggttatcatggaattgatggataccatcgatgaatatatcccaacacctgttcgtgaaacagacaagcctttcttgatgcctgttgaagatgtcttcaccatcactggtcgtggtacagttgcttctggccgtatcgatcgtgggacggttaagattggtgacgaagttgaaatcatcggcttgaagccagatgttatcaagtctaccgttactggtcttgaaatgttccgtaagaccttggatcttggtgaagccggcgataacgttggtgtcttgcttcgtggtgttaaccgcgaacaagttgaacgtggccaagttttggcaaagccaggttcaatccaattgcacaacaagttcaagggtgaagtttatatcttgacaaaagaagaaggtggccgtcatacgccattcttctcaaactatcgtccgcagttctacttccacaccactgatgttaccggtgtgattgaattgccagatggcgttgaaatggttatgcctggcgataacgttactttcgaagttgacctgattgctccggttgctatcgaaaaaggtaccaagttcaccgtccgtgaaggcggccgtactgttggtgccggcgttgtttccgaaatccttgactaatttctgaatatacgcatgaacccgcaagcttgcttgcgggttttttcgtgcaggaacgcctgagcaggctcggtttctgggccttctcacgtgcttctccaatgtaaggtcatccgggcccatgactgagtaccgttagatccaaattcaaagctgcaccaagccacttggcgaaacgcgatcaaaaacacaaacatggtcatttctcctgactgattaagcctccagtcaaccgcggtcaacgccagcactggaccttcactagcatacgatgagtgaccaagctttttcatcgccaaaacatgacgactgttatatgatagatgttcacgaaaagacagagcgtgagctggtgtgttcagaaatctgagcataagcggcctaggtcatgacactcaaggtgcttatgggcaggtatttgcaccagtgaacacgtttaaggaggagccacctatgaaacgatccaccacatggcgcatgttggcgtttttctggcgtcaacttgcggatatgaagcgtcaattgattcgaattatagtggcgctagtgggcgttgccggtgcacaatatgcgattccacgcctgtcacagtatgtcattgaccgcgtgattccgagccgggctgtctcaacactggtgctcacaatttttctggctttaggcctgactgctttggctggcttgctgaatgcgctcagcacatattggattggacaggttagtttaagcgcgatcgcccgtctgcgtgacgctttatttcggcatacgttgggacttgacatgcattatttcgagacaagtaaaaccggggacttaatggttgttttaaccagtgatgtcaacaccttgcagcgtttaatctcaagcaataccttgggcctgttcggaagtatgctgagcttttttgtcgtgctggtgttgatgctgattcaaaactggcagctcacagcgctgattttgctcacgtttcctgttttgttcgttttgaataatatttttgtgcgccgaattcgcgctgcttatcggcgggtgcggaccagttcgggtgtgatgaataaccaaattcaacaagctttgacgagcattgggcttatcaagagtttcacaactgaaaaagcaaccgcgaatacctttgaaaacgttaatgagcagaaccgcgataatcaactgacagcaacacgtcttggagcaactttttcgccgatcactgatttcgttaactatcttggtacggcgatcattttaggatttggtgcatttcaggtaatgcatgggcaattcacagtcgggctaattgtcgcctatacagcttatctgggtattcttcaagcaccgattcgccaagtgaccggcttgattcaacaattgcagcaagcaacggtttcttttgagcggattgaaacactgcaggcggcggtgccgcgggtggtatctccgccaaatgcgatcaagttagcgcgttttcatgaccgcattcaattcgatcgcgtcggctttagctatgatccgtcagtacctgtgcttaagaatattgatttttcacttgctaaagaacaggtgattgcattggtcggatcttcaggtgcagggaagacgaccattacgaacttgctggatcgattttatgatccgacagaagggaaaattacgcttgatggggtcgatcttcgccaagctgacttagagagcttgcggcaacagattgcgattgtttcgcaagatgtgattctattagatggtacgatcaaggagaatcttgaatacggtacaccaaatgctagtgaagcggctatttggcaggccgccgaagccgccaacattgcaacgtttattcgcgacttgcctgatggtcttgccactcaagttggtgaacgggggattcgtttatcaggcggtcaaaagcagcgaattgccattgctagagtctttttgaaaaatgcgccaattgttattttggatgaagccacggctgccctagacaatgagtcagagcgatttgtgcaggctagttttgatcggttgatggcggatcgtacgtcattagtgatcgcccaccgtctgtcaaccgtccggcatgcggacaatattctcgtactggaacatggcgagattgtcgaatctggtacgcatgaccaactgatggcgcaaaacggtcgttataaagaactttatgatttgcaatttacttgataattgcagttagctggaaagcttaaaaatcggaatatatcgcttcaaagctctcagggcgggggaatgtgaaaaaaagccacgctgatgtcgccttttttggccacaacatttacattcaagtgggtttagggtatcatacattaagtatgcaatgtgaaattgcgagactaattgtcggaggtacagcatgtctgcaaaatgggaaaaaaagggcaccaatgatggtgagctcacctttgaaatcgatttaccacaaattcaacaaggtttagaccaagcgtttcaacgtgttcgcaagaacttgacggttcctgggttccgtaaaggcaaagttagccgcaccgtgttcaaacggatgtatggcgacgctgcactttatgaagatgctttgaacatcttgctgccagacgcttatgaagcagccgttaaggaatccggtattgatccggttgaccagccgcaaatcaacgttgattctatggacgaaggcaaaccttgggtcatcaaggcaaccgttacggttaagccagaagtcacacttggccagtataagggtcttgaagtgccaaagcagaacgttgaagtttctgcaaaggatattgacgctgaattggaaaagcgtcgcgaacagcaggctgaactcgttgttaaagacgacaaagcagctgaaaatggcgataccgttgtgatcgactatgtcgggacaattgacgggacggaatttgacggcggctcttccaagaactatagcttggaattagggtcaaactcattcattcctggctttgaagaacaacttgttggtcacaaatctggtgatgaagtgaccgttaatgtcaccttcccagaagactacaaggcagctgatttagctggtaaagcagccgaattcaagaccacgatccatgaagtcaaagttaaggaattgcctgcattggatgacgactttgcgaaggatcttgatgatgatgttgatacccttgatgaattgaaagcaaaaatcaagaaggaattgaccgatcagcgtgaggaagctgcaaagaatgccgttcaggaagctgccatcaaggaagctactgacaatgcgacgatcaaagaagtgccaaatgcgatgatcgagcaagaagtgcataatcagatggatcaatatcttggcaacatgcaacgccaagggatctcaccaaaaatgtactatcaattaactggtacatcagaggatgatttgcacaagcagtttgaggctgatgcagctacgcgtgttcggacaaacttagtccttgaagccatcgtgaaggccgaagatattcagccaaccgaagaccaagtgaacgaagaagtcaaaaacttggcttctgaatacaacatggacgaaaaggccgttcgtaaggctttgagtgaagatatgctcaaacatgatattggtgtcaaacaagccattgatatcatcacggacagtgcaaaagaagtcgaatcagctaaagatgatgctgacaaagaagcttctgacgccaaggctgacaaatagtttgccgtttccacgtaaaagagacgatccccgatcgtctcttttgttgtatgaacgcgtttttagcgtatacttgacgttattcttttagcagaaagaaaggcaagttatttgacaaaacggtgggtgtgcttccgctagtcggcacttgacgcttctgttagaatgaaggtatcaagaaagggttgaatcagatgtttgacaacgtcgaaacgacgggtccagttacttgttctttttgtggcaagtcacaggatcaagtgaagaaaatcgttgctggccctggggtttatatttgtaatgaatgcattgacctctgcaaagagatcattgatgaagaatttaaagaagaagcctatcagaatctgcttgaagtgcctaagccagtcgagatcatgaagacgctcaatgagtatgtcattggtcaagatgccgcgaagaaagctttgtcggttgcggtttataatcattataagcgagttaaccaaatgcagactgcaacgaaagatgacaccgaactgcagaaaagtaatattgcgttgatcgggccgaccggttccggtaagactttccttgcccagacattggccaaaattttgaacgtgccatttgcaattgccgatgccaccacactgaccgaggctggttatgtgggggaagatgttgaaaacatcttgcttaaattgcttcaaaatgcagactatgatgttgagcgtgctgaaaaagggatcgtctatattgacgaaatcgataagatcgctaagaaggcagaaaatgtttccattacccgtgatgtttcgggtgaaggggttcagcaagccttattgaagatcttagaaggcacgattgccaacgtaccgccgcagggtggccgaaagcatccgcagcaagagttcatccagatcgataccactaacattctctttattgttggcggtgcttttgatggtatcgaaaatatcgtcaagaaccggattggtgaaaagacgatcgggtttggaacggattcaaacgagcaagttgatccggataagtcactgatgcagcaaattattccagaagatttgatgcaatttgggattattcctgaattcattggccgtattccgattttagccgcgcttgagaagctgaatgaagacgatctggtacggattttgaccgaaccgaagaacgccttggtcaagcagtatcaaaagctgctgagcttggatgataccgacttggaattcaccccgaatgctttaaaggcgattgcccatcaggcaattgtgcgcgacactggcgcccgtggtttgcggtccattatggaagccatcatgcaggataccatgtttgacttaccaagccgcagcgatgttgacaaagttgtcgtgaccaagtcagctgttgaaggtaaggctaagccacaactggtcttaaccaagggccgtgaagcttcttaaaacgcaactgtcatgaaagcatcaagcgaaaagcttggtgctttttttgactattgaaaaattcttttgaggttagccacggccgtgtttgcggataaggtgtcacccgaatcacgaccggtttctccggcgaggctgcgtaaaatatgctaaactatttgaagcggtgttgtgtttagacatcacgttgaggtaaagccaagaggaggccgtttgagatggacgtgcatgacgtcaaattaactattagtgcggttgcggccgctcagtatcccgaggacggtcatccagagatcgcttttttgggccgcagtaatgtcggcaagtcatcactgatcaataaactgattcagcgcaaagccatggcacgcacttctggtgtgccaggtaaaacgcagacattgaatttctatgatcttgatagtcgactcttttttgttgatgtacccggatatggatatgctaaggtcagcaaaaccgcacgagcgaagttcgccgccatgattgagacttatctgacgacgcggcaaccattgcgcggtgttgttttgctggtcgacagtcggcatgagcctactgctgatgacatcagtatgtatcagtatttaaaatattatcagctcagaacactggtagtggccaccaaaattgataagacgccaaaaagtaaacggctgcatgtggccaagcagatcaaacagcgacttgatttgaatcagaccgacgatgtgattctattttcggcaacaactggtgaaggttatgaggctgtctggtcttggcttgaacaaacggctggcttggagggaagataaagcatgaatttcaatgactatcagcaaaaagcaaatcgcaccttagctggcaatgaacacgttttgactaacctgtcattagggttggcaagtgaaagcggcgaagcgatcgatttaatcaagaaatatacatttcagggacaggatcttgataaagtcaagctgcaacatgagctaggcgatgtgttgtggtatttatcacagattgctttgtgggcagacattgattttgatgatgttgcaacgagtaaccttcaggaattggcgaaacgctacccacaagccaaaaaataatcggtttctaggtatgaaaaaagcgaagtgcgtgggcacttcgctatttctttgcttctttttctgttttttctttggctttcttggccaatttgtcgtggtgttttggatctggcccggttgcgttctccttatcaccaggcagactggcaaacttatcgaacatgtcattcaggttggtttgtgtgttgattttcagtgccatgcacgccacccctttccttgctgaaagtatagcatcaacactggggcgcgtctaggtaagtcgcccgaacaaaaaaatttggaaaaatatgaatgcatattgcataaaaatcaatttgagtgtatagtacactcttgtaatcaaggagggtattatgaagcatttgagacgctggttgatcgctttagtcgctgtttttgcggctgttgtgacattgaatatgcaaacggtccatgctgatgacagcttggccaaggttcaacaaaaaggtacgttggtgatgggcacgagccctgattatgcgccgtatgaatttttagtcaacaagaatggcaagaatcaagttgttggcatggatgttgaagttgcgcgtaagattgccaaggatctgggtgtaaagctggtcattaaacagatgaactttaactcacttctggtcgccttgcagacgggtaaggtcgacatggtgttggcggcgatgtcaccgacgaatgcccgacggaagtcagttgacttttcaaatacgtactacaagtctggacaagacattttggtcaacaaaacggatgctaagatctacaaagaccataaaagttttgcgaacaagaaagtcggcgtccagaatggcagcttgcaagagacgttagcgaaaacacagatgaagacgagttccacattgggcttgactaaggtcaccgacctgattttggcgttgaagacacataaggtagctggtgttgtcgctgaaggtgcggtagcgaaggcttacacgtcaaatgatgattcgttagttgagattcccggtcacttcaacttatcaagcgacacagtcggtaccgcgataggatttgctaagaactctgattcattagtggcagccgccaacaagagcttggcagagattaagcaaaaaggtttaattaaccagtatctcaaaactgctggcagttacatgaaaaccaatactgaagataccagtatgatccattactggacctacttcctaaaaggggtcgagtatacgctgttgattagtgctatcggtgctttcttcggggttctactcggcacgatcttcgccttgctgcggttgagcaagaataaactgtcacatttaataggtgtgtcatacattgagttcgttcgtggcactccgctgatgattcaagtcatgtttgtctatttcggcatagggatcttcattgatattcctgcgctaatagcagggttgattgctgtttccttgaactcggcggcgtatgtggctgaaattatccgtagcgggatcgatagcattccagtggggcaaacagaagctgcccgttcgctcggtctgtcagagcggcagacgatgataagcgttgttttaccacaagcaatcaagaatatttggccagcgcttggtaacgaatttatctccttgattaaggaaagctcgattgtttccattatcggggttaccgatctgatttatcagttaacggttgtccaaaccgcgacatacaagggagttcaaccaatccttgtcgcgatggtcctctactttgttctgacattcgggctgtccaagctcttgagtcattttgaaaggaagatgaatcatgcagcataaacctttaatccaaatcaatcacctcaccaaaaagtttggcgacaatgttgttttgaacgatatcaccgaaaccattgacaaaggcgatgtgatcgttgttatcggtgcttccggtggtgggaaaagtaccttcctgcgtagcctgaatttactgaatcgaccaacaaaaggggaaatcctttttgaaggtactgatttagttggtttgagcgagaaagagctggataatgtccgagaaaaaatgggaatggtgttccaaagttttaatttgttccccaatatgacagttttggaaaacattaaactcgcaccacttaaagtcaaagctgtgaccgatgaagaagcaaccaaaacagccaaagaaatcttggatcaagttggcttagccgaaaaggcagatgcttatccatccagtctttccggtggtcagcaacagcgtgtcgccattgctcgtgcattagcgatgcatcctgatgtcatgctgtttgatgaaccaaccagtgccttggatcctgaaatggttggcgaagttctgaaagttatgcaggatttggctaaaaccggaatgaccatggttgttgtgacccacgaaatgggcttcgcccgtagtgtggccgatgaagtatggtttatggatggcggcaaaatccttgaaaaggggacgccagaacaactgttcgaacacccgcaagaagaacggacacaagacttcctatccaagattcttgcccaataagcaaaaacacctcacccagcagctggtaagcggcactggttgaggtgtttttggtgtgaagtgaccattgctaaatgggggcagtcatgccatcactgatcaaagccgcttgcttgcaatctatttttagaatctttataatgttagcgaacatttgttttataaggagattacgatggcctcagcacacattgaacacaagttatcgttgctgccagatctgcctggcagttatcaaatgaaggatatcaacggcaaaattatttatgtcggcaaggccaaaaacctgaaaaatcgggtgcggtcttatttcaagagttcacacgacggtaaagttgcggcgatggtgtcacaggtagcggattttgatttcattgtgacttcaactgacaaagaagcctttttgctcgaaattacgctgattcaaaaatatcagccgtattacaacattaagttgaaaaaagggactggctatccgtacattaaaattactcatgaacgcgatccgaagattgaaatcactggtactatccgtaaagatggcggttattactttgggccatgcccaaatgtctatgcagcgcaagaaaccatgcattttatccagaaggtttatccattgcggcgctgtaacggctatcaaggcagaccgtgcttgtattatcacatgggtcagtgtctgggtgcctgcttccggactgttccggaaaaggaatacacggaccaaattgaacgtattaagcgcttcttgaatgggaacgttggcaaggctaaagccagtttgacggctaaaatggagcgggctgcgaaaaatcttcaatttgagcgagccgcagaaattcgagatcaactgcattatattgaacagacggtggagaagcaaaaaattatttcacacgacaatacaacgcgtgatttgttcaatttttatatggataagggctggatcagtatccaggtcttctttattcgtcaagcacgtttaatgaaacgtgagtcacgactttttccagtggtgaatactgccaaagaagaattcgaatcatttattttacagttttacagccgcaggaataatgtgaaaccacgcgaagttctcgtacctgctgggcttgataataaagtactggcagatatcttagagattccagttagaacgccacagcgcggtgaaaaacgggacttgatggccttggctgctaagaacagtcaaattaagcttgaagacaaattccgtctgatggaattggataatcgtaccacgattggcgcgatgaaagagctgatggccgctttgaacttgccaatggggcatgtggctgaggcattcgaccacagtcacattcaaggagctgatccggtgtcggcgatggtgcagtttgtggatggccagccagctaagaacaattatcgaaagtacaagttggatgctgacaaaacgcataatggcgcagatgaggcggctaatacgcgcgaagtcattcgccggcgctatacccggttgttaaaggagcgtgcaccgttaccagatttgatcttgatggatggcggcgagattgaaatgaacgcagccaaggatgttttggaaaacgaactcaaccttgatattcctgtggcagggatggtcaaaaataataagcataaaacggcagcattgttatttggcaatgctgatcagctgattaatcttgatcctaagtcgcaaggcttttacctgcttgaacggattcaggatgaggtgcatcgttttgcgattaccttccatcggcagctgcacgccaagaactcgttggcctctcgattagaaggtatcaagggggtcggacccaagacgcggctgaagctgttacggaaattcaagacgatcaataagattaaagaagctccccttgaagatattcaggagctaggtatttctaaaaaagttgcgcaggcattgaagctgtcgctgacggcagagccgacaccagcgcggcgggtttaatcaaatcgtaggagcgtttaggacatcgttcataaccatcagtaagaacaaacaatcttgagatttaaagatctagtgccaaggcgaagcaatcgtaggccagatggggctcagccgtgcaaacaacacagagacaggctctggagctgatgttgttaggcgacttcgagaccgcgggctttgcgggctcgaagcgccgtctccgctctagctacgcgtcgccacctcatctggtcggaaattgcggagtttggcacggcaagcgaattttttggctaggaatttaacgcaccacaagctcttatgtggaattccggttcggtctcacggcacaaaaaagcttggcgacattgatcgccaagctttttgcttacttatttattttcttttgcgactggtcgccagaagccgaggattaaggcggcaatgatggttccaatcagaagtgacatgatgaagccaagtttctggttggttagcagcaaggcaacaacgccaccatgaggagcagggacgttgacgtgccataactgggttaaaccgccagcaatagctgagccgatgactgagctgccaatgatatgcagcgggtcagtagcagcaaatgggatcgcgccttcagtgatgaaggtcaggccaagtgcatagttagaaagaccagcgttgcgttcttgcaaggtgaatttcttcgggaagaaggttgaagcaaccgcaatggccaaaggtggaatcatgccaccaatcataaccgcggccatccaccgaccatctttaaagccggatgcttgatagacaccgatggcaaatgtataagcggctttgttgaaaggaccgcccatatcgatactcatcatggcggctagaatgacgccaatcagaatcgcattaccagtacccatgccttcaaggaagctgatcaatgcgccattgatagcggcgaaaatcgggttgatgatgaagaacatcagcagacccatgatggcaaggccgatgactggatagagcaggatcgtgcgcataccgtcaagtgaatgtggcattttgctgagcagcttcttcaagccaacgatcatccaaccagctgcgaacccagcaaccagaccgcctaagaagccagctgggttttgagccttcacaacggaggccgttgcaacggtggccatataaccaccgacgaacccaggcatcaacgcaggccgatcgccaattgattcagcaatgtaggccgctaaaacgggtactaagaagctaaaggcaaaggttcccaagttgttggtgaaggtgaaccacatcgatgtcttgcccagccattgttcgaggatgaacgagatcgccatgataatcccaccgccgacaacaaatggcagcatgtttgaaacaccattcatcaggtctttgtagatgcgattccataaagtgccgccagaagcctcttcactggctgcatcactgttatcggtgcctgcagcatgaaagacttggcctttgccttgaagcatttcttcaatcaattcttcaggctttttaatgccgtcaatgaccggccgattgagcaactttttgccgttaaaccgatccattgctacctttttgtcggcagcgacaatgacaccagctgctcgattgatatcggaatcggtcagtttgtgcttaataccttctgagccatttgtttcgactttgatatcgacaccgagcttttccgctgtttctttcaaggctgcctcagccatgtaggtgtgggcaatccctgttgggcaagcagtgaccgctacgataaatggccgttcctggcgcttttctgccttgaattctgcttgcttgtcagctttttcttgttcttcctgagccttttccttggcttcttcagctttatctttagcctctttttcagcttgcgccttaccaaacaaggctaaaacatcatccggtgtcttcgcttgtttaagatctgccacgagcttcgggttgatgagcagggaagataatgctgcaagtgctgccagatgttcattgttggcaccttcaggggcagcaatcatgaagaataagtgaaccggctggccgtctaaggcgttaaagtcaacgccctgatcgcttttggcgaaaagaacggttgctcgagtaaccgcactgtctttggcatgcggcattgcaatgccttcgccaatcccagtcgttgattcggcttcacgcttcagaatatcttggcgatactcgttttcgtcggtcacaataccttctgcatggtatttagcgaccactcatcaatcacagcctctttggacgttcctttgaggtccatgatcatgacattttttagtagtaaatcacgaatgtccattttgtcctcctaaacttcagttatactaattgtttgtttcacttcagcgattttgtcagcggtggcaagatcttcagaaaaagcggtcgcggaaccgcaggcaatgccgactttaaagctttccaacgtgtcatgtgtctgcgcaaatgtgccggtaaaaccagctaacatactatcgcctgcgccgacggaattaaccgctggctgcttaggaacggtgccatgccaagcgtgatcttggtcgatcattaaggccccggcccccgccatggagatcaagacatgctgagcgccaagaccaagtaggcggcgaccagctttgatgatggcatctgtgcttgtatattctggatcgccgaacaatgctgctaattcatggtgattaggtttgacgacaaggggatggtcaggcaatgtgtcgagtaacgcttgaccagtggtgtcgatgacaaaatcagccttgtgggcatgaatcaccggaatcagatcccgatagaaagtgttaggcaagccttttggtaaactgccagacatgacgacgacatcgccggcttcaagtttgtctaatttgtttttgaaggcggcaatttcagcagcgtcaatggtaggaccgcttgcattgagttcagtttcggatgctgctttaagtttgacgttgattcgtgtatcaccagcagtttttgtgaagtcacaaggcatgtcaatcgcatcgagccgatcttggataaaggtaccggtaaaaccgcccaaaaagccccaagcagttgttggcaggcctaatgtttgcaaaattcgactcacattgatgcctttgccgcctggtaatttaacggcgtgcgtaagtcgattgacagcaccaagttcaagttccggtaactcgatcacataatcaatcgaagggttgagcgttactgaatagatcaagaatgaacctccttaatattttcaaatcgctgataactggttgggagtccttgtaatgaacttgtcaggatcgtggcatcggagatatcagcaaagcggacgaaactgacttgctcaaatttacttggatccgccagaatgacaggtttactggcttggtgaatggccaatcgcttgatcacagcttcttctggatcaggcgtagtgagaccaaactcaggatgaacgccgttagttccaataaaggcaacatcaaaccgataatggttcaaggcttcagccgtcgtggcgccaatcaacgctttggttgtgggcttgaccatgccgcccagcatgagtgtagagatttgataatcagctaacaaagaagcgttatcaacccccgttgtaatgactgtgacaccaatgtcggccaaaaaaggaattaattgtgctgttgtggttccagcatctaaaaagatcagatcatcgggctcaatctgacgaacggctgcctgcgcgatcgtttgcttggcgcgcaaattctgcgcagatttgctcgcgacatccggttcatcgccgaggccattgatgcgcttggcgccgccgtgaatgcgtttgagctcacctgctgcctctagctcgtccaagtcgcggcgaatcgtggattcagaagcatcaagagcagccataagtgccttagatttgatgacggtatgctgttgcaattgggcaagaatatattgccgacgttcttctgtaagcactttcgtttcacctcgttcttcattatactgatgaaaccgtcaaaagcaacctaaaacgtgcaaaaacattcaacaactgtcagtaccccgactgacgcggcatattggcaatgttttctaattcttgtgcatgaagggtgagtaccggcttgggacgtgttaaaatagttgaggtatgcgttacgctgtactgaaatataaacatcgcgtataatcaaatgacatgtttttctgaaaggagatcgccaatgtttgtcgatcaggttcaagtagaggttcaggcgggcaaaggcggcgacggtatggtcgcgttccggcgcgagaaatttgtaccgtttggcggcccggccggcggtgacggcggtcatggcggcagcatcatcttatacgttgatgaaggtttgcgcacgttaatggatttccgttatcaacggcattttaaagcgtcagctggtggcaatggccaaggcaagcaaatgtatggccgcgctgctgaagatcggcggattgcagtgccggctggtacgacagttaccgatgctgacacaggcgaggttttaggcgatttaactgagccgggtcaaactttggttgttgctaaaggtggccgcggtggtcgcggtaatatgcactttgtttcgcccaaaaatacggcgccggaaatttccgaaaatggcgaaccgggcgagcatcgtttcatcaaattggaactgaaggtgcttgcggatgttgggttggttggttttccttctgtcggtaaatcgacactgttatcagttgtaacccaagccaagccaaaaattgcggcttatcaatttacgacgttagtacccaatcttggtatggttcaattagatgatggtaccgattttgtgatggctgatttgcccggtttgattgaaggggcttcacaaggtgtcggtcttggcatccagttcttgcggcatgttgaacgcactcgtgtgctactgcacctagttgagatggatcctgataatggacgcgagccgcttgatgattacgatcaaattcgtaaagaattaggggcttatgacgataacattttgaagcggcctgaactcgtggtcgcgaccaagatggacttgcccggcgcggctgaacgatttgctgattttaaggcagcgttacttgctcgtggcgtcgcggcggatcatatctttgaaatttctagtctgacgcatcgtggcgtgacgccactcatgcacaagacagccgaagtactcaaaacagcaccgcattttgagccgaaacaagcggcggttaaaacggctgattataagtatcaaccagagccggctttgaaagtaacccgcgatagtgacgggacgtttgtgctcactggtgacaagattgagcgggcgtttaaaatggccaatcttgatcatgaagatggcgcgatgcgctttgctcggcaattacgcagcatgggggttgatgatgctttgcgtgatgctggtgctgaaagcggcgatttagtcgccattgatgattttacatttgagttcgttgaatgatcttcggctgaacggctggggaagttatttttagacagaatggtggggccgcaattgaaacagacgcgtggacgaaagcgccggtacattcatggatttgatggtttaagaacaatcggggttattggtgttattttgtatcatttacgccccgagttgtttcggggcggatatttaggcgtaccgatcttcatggtcgtgtccggctatttgataacggatgggttgttgatcgaatttgaccgcaatcatcggattgattttaaaagtttttttattcgacgatttaaacgcctatatcctgggttaattaccgtcctctttgggacagcagcctatatcacgttattctcgcaaaacttgctgcataacttgcacatgatggtattgaccaatttactttatgtgtacaattggtggcagattttgaacgggcaatcctattttgctagatatgcaaatggggaatccccatttacgcatttgtggacgttgtcaattgaaggtcagtattatctcatttggccctttcttgtgttggcgctgttgctattggttaagagccggcatcagattgcgaacattgtgctgattcttgcggctgccagtggcgcttggatggcaatcttgtatatgatgaccattgcccatgtacagccagcagcgtttgatccaagtcggctttattacggtactgatacccgtgcattctcaatcctattcggagcagcgctggcctttatttggccaagtggccggctttcgcaacacttaggtaaaaaatgggtgattgggcttgatcttctcggtactgccagctttctcggcttactagtcatggtcttcacaattgatgcccagagaagctttctttatgaaggcggaatggtattgttctcaattgtgacaacgattttggtggcagtggtagcgcatccggcagctcattttgaccgattgttaagtaatccgttgttcagctatatcggcagtcgtagttatggcttgtatttgtatcagtttcccgtcatgatcttttgggagaatcgttttcgtaacattgcggatcacccagtattatatccggtgattgaagtggtgctaattgttgttatcaccgaactttcttaccgcttcattgaacaaccggcggcacattttaattatcacaagacttgggcattcctaaagggcttggctaatcctaaagttcgtatggggaaaacgcgctgggttagttatgtggcgctgattatcttagctattggcagtgttggattagccaaagcgccttctgttaaagcagaaggtgacaactcgcctttagcacagcagttaaagaagcgtggtgtttccactaaagagaaagaaaagcggttggcagcaatgcgttccagtattgctgcacaaaagaaagctgacaagaataaagcggccgaagaatcaagttccaaggcgctagaagccaagtatgcttctcaagctaaaacgcatccagtcaatcgtgagtatgaacaatacggcttgacccagattcaattgcaacaggcacaagacattggactcactgctattggcgactctgtcatgcttgacggtgaaaatgggcttcaacagctgttccctaaagctgtgattgacgctgctgtttctcggcaaatgatcaatagtattgatttggtccgcagttacgctgaccgcggtgtgctgggcaatatcgttctgattgggttaggaactaacggcccattttcagatgatcagctagcgcaaatgatgcaagccatcggtcctgatcggcaagtcttctggattaatgtacgcgtaccaacgcgcgcttggcagaatgatgttaatagcaaattggccgcagcccagaagcagtataagaatctgacggtgattgattggtatgacaagtctaatggtcatcctgattggttctacaacgacatggttcatatgaatccgaatggcaatccacaatatgcggcattagttgcaaaaacgattctggacaaggtgaaaaattaagcttccgacagatgattgattgcgttgatgagacaaatatgtcggttgatttcatgaggctgagcggcatcaagtcgctcagtttttttattagcggttgcagttagcggtccaccttcgtcttttttaaaccttgcaaatctcggcttaccaacattgaaaccgcgaaaatggcgaggaacttgtggtagactacaaagtgaagttcgacagaataggaagtatggtatggaaattcaatttttgggcacaggcgcagggtcgccttccaagtctcggaatgttagcagtttagccttaaaattacttgatgagcgtaatgaggtttggttgtttgatgccggggaaggcacacaacatcagattttacaaaccgctattcgaccacgaaaaattgccaaagtatttattactcacttgcatggggaccatatttttggcttgccagggtttttggccagtcgctccaaccaaggcggcacagatccgttgacgatttacgggccttctggcattgaggattttgtaaaaaccagtttgaaggtttctcaaagtcatctcagttacccgttaaaatttgttttattacagcatccaggcgtggcttttgaagatcaaactttcaaagtcacttttgatcgcttggatcatcgaattacgagctttggttttcggatcgaagaaaaaccgcaccctggcgagttgttgattgataaggtacgtgccgctaaaattccttctggaccggtttatgcggctttgaaggccggcgaaactgtaaccttgccagatggccggatttttgacggccacgatttcattggccctgcgcaacctggcagaacggttgccattttcggggatacccgcatgtgcaatcgcgcgctgcctttagcagcaggcgctgatgtgttggttcacgaaagtacctttggaccggatgaaagccaattagctaagcagtattatcatgcgaccaatgtacaagcagcggcgttggctaaacgtgcaggtgtcgggcggctcttgctgaaccatatttcggcacgatatctgagtcccggggtagcgatgttggaaaaaacggcgcggcagatttttccaaatacgcatgttgtcaaagacttcgaggaaattaacattccatttcggagtgaacaatcgtaacctgctgtcacagttaaatcataaagctcagcggtagcaagtgaatatcaaaacagaggaggaaatcatgatgaaccaacatccgacggtggttatttctggaggatcgtcaggcttaggcaaggcgattggacttgaggcagcaaagcaaggcgcaaccgttgtctttttggcgcggcggcgggagaaattacgtcaagcacaggcagaggccagcacgctttccggccgaccagcttatgctttccctgttgatgttgctgacccagttgcaattgaagcgaccgttgatcaaattcacgaaacggttgggccagttgatattctggtgaatgccgctgggtttggtcattttgaaacagccttcgataccgatatgcaggtagtagagcgcatgtttcgggtgaatgtgctggggatgatgtatctgacgaagttgctgggtcgcgatatggtcacgcgtcagcaaggacaaatcattaacattgcttcaatggctggaaaaatggcgacgcctaagtcagctatctactcagcaaccaaatttgcggtgcttgggtatagtaatggcttacgtcttgaactgaagccattcggtgttaaggtgaccacggttaatccgggaccaattgccacgaatttctttagcgaagccaatgcgttagactatttggctagcgtttcttggctggttttggatccagataaattagcgcggcgaattgtagcgacatttggtcgaccagttcgggaaatcaatgcaccgtggtttatgaatcttggcgcagatttttataccttgttcccgcatttgggcgattggttagctgctggtatgtttaataagaagtaaaggggtaggtcgtatgaagggtcaacaacgttttattattgggttagttctggcattgattttaattgtttttgccttgttgaatgggcaagacgtttcggttaatttcttcggtattcagctaaagtggccgttgatagtgattattgcggtttccgtgttgataggtgccgttgtgacctggttgatctcaaccagtgctgtttcgagtgctaaaaaacagattcgtgagttgcaacagcggatcacggagctgacaaaatccaataaaactgacaagccagcccctaagccagttcaagcaccaaaagaggaactgtcaacagatgcgacggataccaaaaaatagacctttgaggattgaactgtcgtacctagctgtcaatagaggagctcgtgacaaaattctcagtcagacaaataaacaaataaaaggaacaatttttcgattgtacgattggaaaattgttcctttttgccttcacatagattatttaatgcgattttaaagaccgtagtgccaaaacggagcaatctaggccacctgaggctcagttgtgcaagcaacacagcgacgggcttcctacgatttttttaaatcatcatgaaatttaaaaaatggtttgaccttaactgaccaatgtcgtattgtgaaaatgaaaactataatgtaagacgatatttttcagggaggcatccgtattcatgaacccagataattttacgcaagccgttgccgaagcacttggcgcggcacaacaaattgcccaagttcgccgtcatcaagaaattgacatcccacatgtcatgaaaagcctggtgcagcctaatcaattggctgaacagatttatcgtgaagccggtgtgaatgtgcagggcttgaatgctgcgattgatgcggcactggaagcagagcctgtcgttgaaggcgctagcgcatacggacaaagcatgtcccaaaacctgtcgcagctactgacagatgccaacagcgtgaaggatgaatttggcgatacctatatttctacagaggcagttttgctcgccctttatcaacaacgctacaacccgatcacccaattcttgttgaacgatgccaaggttgatgcaaagcgattacgacaggtgattgagaacctgcgcggtggtgaaaaagtaaccagcaaaaatgccgaagcctcttataagagtttggaaaagtacggtaccgatcttgtaaaagaagcgcgcagtggcaagatggatcccatcatcggacgtgatgaagaaattcgcgatgtcattcgtattttgagtcgcaaaactaaaaacaatccagttttgattggggaaccgggggtcggcaaaaccgccattgtagaaggtttagcccagcggatcgtcaaaaatgatgtgcctgacaatctgaagaataaaactatcatctcacttgatatgggaagtcttgttgccggcgcgaagtatcgcggtgagttcgaggaacgcttgaaggcggtcttaaaagaagtcaaaaagagtgaaggccaaatcattctttttattgatgaaattcacaatattgtcggtgctggtaaggcagaaggctccatggatgctggtaacttgctgaagccgatgctggcccgtggtgaattgcatctgatcggtgccacgacactggacgagtaccgggaaaacatcgagaaagataaagcccttgagcgtcggttccaacgggtgctggttcaggaacctagtgttgaagatacgatcagtattttgcggggtctgaaggaacgattcgaaatttttcataaagttcggatccatgataccgcgttggtcgctgcagctactttgtccaatcggtatatcacagatcgatttttgcctgacaaggcgattgatttggtggacgaggcttgtgccacaattaacgtggaaatgaactcccgcccgactgagctggatgtggcagagcgcaaacagatgcagttggaaattgaacagcaagcactgaagaatgaaactgatcctgccagcaagaagcgattagcagatgctgacgctgaattggccaacttaaaagagaaaacaaataagctcaaggctcagtgggaagcagaaaagaaagatattcgtcaacttaacgagaagaagtcggcgattgataaagccaagcatgaattggaagatgcccaaagtcgctacgatcttgaaactgctgcacgcttgcaacatggcacgattccacagttggaaaaagagctgcagacgatggaacacagcgatcgtccccaatcttggctagttcaagaaagcgtgacagccaatgaaattgctgcggtgatttcgcgggaaaccggtattccagtagcgaagttggttgaaggtgaccgccagaagctattgcatttggcagataatctacaccaacgcgtcattggccaaaatgaagccgtcagcgctgtctcggatgctgttttgcgatccagggccggtttacaagatccaagtcggccacttggcagcttcttgttccttggtcccactggtgtcggcaaaacagaacttgctaaagcattggcagaagatttatttgattcagaaaaacacatggtgcgaattgatatgtccgaatacatggaaaaggccagtgtgtcgcgattagtcggggcggcccctggttatgtcggctacgaacaaggcggccagttgactgaagcagttcgccgcaacccatataccattgttttgttagacgaaattgaaaaagctaacccggacgttttcaatatcctcctacaagttttagatgacggtcgtttgacagatggtcagggacgtaccgtcgatttcaaaaatacgattatcatcatgacgtccaatttaggctccgagtacctgctggacggtgtgcaagaagacggcaccgttagccaacaagccaaggataatgtgcggcaattggtcggcaaagcctttaagcctgaatttttgaatcggattgatgatattatcatgttcaacccactatcattagcagatgttgaaaagatcgctgtgaaggatctcaagcaattaggcacgcggttggccgatcaacagatatcgcttgatatcacaccggcagcgcaggagtggttggcccataaagggtatgagccagcgtttggtgcccgtccactgcagcggttaattacgagtgcggttgaaacgccgctggctaaagaattgattcgcgggactgtgatgccgggtcaagaagtcgtcatcacggttgcggacgatcagttgcaatttaaggcaaaaacagtaccggtcaaagcttaaaccggctgacaactgattttttctgtaaagacccttgccttgacgcgccttttcatgtatgattatcattgctgtgacagatagcattctgtccacgcgtgatgatgattggacttgcattttgatcatcaaccgtataaagttgtttagaaatcttactaaaaaaggggttttccgctcatggcagttccagcacgcagaacgtcaaagaccaagaagcgtatgcgccgcggtcatatcaagttgaatgtgcctaacttgcaattcgacgcagcgaccggcgaataccgcatttcccaccacgtttcacctaagggttactacaagggtgcacaagtggttaagaagtccgacgataacgcaaatgcataatcaaaagccaacatcttaggtgttggctttttttgtgtgtgagcgctcgccagcccgtttagaaaccggagtgtaagtggccctgaacgtgatgaccgggttttggtcattgcgttcaggggccttacacgcaggtttctgggcttgcgagcgcgttatggtgaacggagtaggtttctgggcaggtgcacgcgttatggtgagcgtgagtacgagcagcaagaagtcgaaacataatcgaccttaccaatgaaaactgtactttgatcattaggtaaaatattagcatcaatcggtccacgaatggttatcaagtctagctcacatggtatactcttcttgaaagaggtggcagcatatggctgataacgaacaatttgccgattatctagggcaacttcaagaggcgcagtttccgcgctggactgatctgccccaatttgacttgtatatggatcaagtgatccagtatgtcaatgatattgtcacaccgctggggtttggcgagatcacatccacgatggtcaataattatgttaaaaaaggggttattaaagccccgcttaagaaaaagtatcgtccagaacaattagccaatattttagtcattgcgatgctaaagccagtttttgcgttggatgctattgcggcaggtattcaattttcacttgccaatcggccggttgcacaagcttacgatgcgtttattctcacttttagcagcgcaattgagcaggcaaattcggattttagcgatggtttaaccattagccgcgtcaataaaccagatatgacgacaacccagcatgccattgtgacaatggccattaatgctgttttacaaaaactgttagttgaaaaaatgattgatctggctgctgatgattcggaaaagaaagggaaaaaatgaaactaaccattctatcgacaagtgacacgcatggttttgtcttgccaactaattatgtgaaacgggatcaggatttgcctttttcattagccaaggccaaaacggtgcttgatgctcagaaggcagcagctgaaggtccagttgtgacgattgaaaatggcgattggcttcaaggatcaccactggcctattacgttgcgaagatcagcaagcagccagatcagttgacgcgactgtataacgaggttgggtatgatgccggcattatcggcaatcatgagtttaattacggcagcgactatttgcggcaagcgttgaaaacattgacctatccaaccatcaacgctaatatcaccgaaaatggtcaaccagcatttggggcgccttatcaattgattgagcgctcaggggtcaaaattgccattctgggtttgacaacgaactacatcccacattgggaagcaccggcccatattgccggcttggcttttcaagatgtggtagcgactgccaagcactatgtcccattgttgcgtcaacaagctgacgttgtgattgttgcttatcatggcggttttgagcgtaacttgcagaccggtcagccgactgagccattaaccggcgaaaatgtcggatatgcgctgacccaagtaccggggattgatgctttagtcacgggtcatcaacatcgacaattggccggattagttaacggtgtaccgatcacccagccaggttaccgcggggaagcgatcggtaagatcacacttgacttaaatcagacagcgagcggctaccaatttactgctagcaaagccgtgttagtcaaaacaggcggatcaattgcgagcccaaccattttgcagtcagcggctgatttgaatcaaactgttgaaacttggttagaccagccattagctcatgttgaaggagatatgcgcattcaggctccatttgttgcgcgggttcatgaggtgccgtacattgagtttattcaaaaagtacaaatggccagcaccgatactgacatttcgggcaccgctttgtttaacaatgaagggcgagggtttggtgaaaccatcgacatgcgggatgtcgtcacgaattacatttatcccaacacgctagctgtgttgcggttaaccggcgctgatttaaaagcagctctggaacagtgcgccgaatatttttcgctagatgctgatggcaagttgacggtgacgccccgatttgagcggccaaaacctcagcattacaattatgacatgtatcagggcattgattatactttggatattcatcagcccgtgggcagtcgagtaactcggctgctttatcacggtgcgcaagtacagcccactcagacttatgatgtggcggttaatcaataccgtgcggctggtggcggtaattttaaaatgtttggtcctgataaagtcatccgagaaaatcaaaaagatatgaccgaattgattgccgattatttgcaggaacacccattaatcaaggcaactgctgaccaaaactttaatgttttaccgtcaatgtgacagtgagtcatatttcgcttgtcaagcagcgaaggaacgcttatgctgttggtcgttattgaattgtgcatagcgaaaggattgttcggtttaatgaaaatttggaaatataccatggtcggcttattggcattcgtgctagcaggttgcggccaacaattaagcactaccaaaacctcatatgggcgtgacggactggtcgccattgttaaagggacggcccgcggtgtggatcgcgtcagttatacaagtgatgccggaaaaggcagtgtgccagtcaattcaggcacgtttgtggtcaatgtgcccgttagcgatgtggctcaaaaggtgaacctaaaagccggtagcatgcaaactaacgtcacggtgaaagccggtcaatcgctcggaacttatagcacgattgcggcaaagtttaatcaaatgctggcggtatccagtctacctaaagcggatcaagccaagctaaaacaggcacaggctgcaagtgccaatgctcaaaagaacgttgcgaccatgagtccaactgagaaaatggcaatggctcagcaagcacaacaattgaagacactgatggctcaggccaatgccaataccaaagcatcccaactgccggcaacggcgaagacgggcattcattcaatcttaaaatcagcaagcggcgattaccgcgcaagtattgttgatggcaaggcaatggggtttgccgttgtggtaccattatcagttttgaaaaacagcaagaagatgcagacgtttgccactgacttcgggttactcacaacttcggtcggtgctgatgccaagtcagttttctcgcaatttaagaaattgacgaaggatgctaagtctaaaaacaatgcgacgaccattagcacaatcaagagtcacggcgtcaaaattgatgttggttattccaccacagcactttacctgtatgtgacaaaataagcttgcgtcactcattccaaaaacgtcagcacatgcaaagtgcccggttattgttagacatgccagtctagcaataatcgggcactttgacgtcattgacgatttaattaatgttctggtttttccgcaggttttgcaaaatgctgcatgattggcgggaagaagaataaaatgacaacgaagatcacactgataatcgcgcttgtcttcgggtcgtagctgccgccgctcaaggcgctgatcaggaagccgacaacttggccgaggatcacgccccagataatagtaggtagataacgcatggaatccctcttttctgtcgtcatcttaccacgaccacaagcgaattcaactgaaattgtgagtatttccggtataatagaagcgaggtggcaagatgacgtttacccaattacaggttcatagcaattataccttattacacagcccgttggcactgtcggatcttatcagcgcagcaaaatcacgcggttattcggccattgccttaacggacactaatgttgtttatggtttagtcgagttttatcgacaggcgaaagcggctggcttgaagccgttattaggcatgcagatcgcgattgatgatgccaaacttttagtgattgccaaaaataatcagggttaccatcagttacttaagatctccacgcaaattatgctagcaacttcgccggtggcctttgcggacttattgcctttgacaggcttagtcgccatcaccttaccggattcaccattttcggcggcagttgttgctaacgaacacgacagagctgtcgcttttttacaggagcttgataataaacagccggaagcggtgtatgttggtctggatgaggctcatttagatacgccattgccggcatttgcgactagtcagcaacttcacctaatggcgttaggtaacgtactgtatcgtgatccgactgatgcttttacgcaaaaagtgatggcagcgattggtgatggtagtcagttgaactttcgtgacccagttttaaccgatgctgggccatggtggttaaaaccgccagcagatgcaagtgcaccttttgttgctgctggactacaggcggcagttgacaacgcggctcagatagcggatcaaacggatgtgacgattacgttcaagcagccgcagctacctcattatcaaacgccagatcagcttgcgtctaaagattacctgaccaaactggctcaagaaggcctcgctaaccgttttcacgatcagccgattccgacaacctatcagcagcgtttgcaatatgagctggatgtcattatcaaaatgggatttgctgattactttctggtggtttgggatgtgatgaattacgctcacaaggtcaatattatgactggggctgggcgaggatcagctacgggctccttggtcagttacgcgctggctattacagaagtcgatccgattgcttatgatctgctgtttgaacggtttctgaatcctgctcgagcgcaaatgcctgatattgatttggacattcctgataaccgtcgtggcgagctgattcaatatgtccatgacaaatatggccgaaatcacatggcccagattattacttttgggacgttcggcgcgaaacaggcgatcagagatgtggcacgcgttttcggtatgagtcagtttgaaagtaatacttggagcagagcaattccaaacttgttgcacatggatttaaaaacagcatacgatcagagtcagccgttgaaaaatttggtggccgattcaccaaaaaatcgcatgctgtttcaaaccgctttagcattggaggggttgccgcgacattattccacgcatgcagccgggattgtgctttctgaagaaccactaactgacaccgttgccttgcaacccagtggcgatggtcttgaacagacgcaggtacccaaagatgatgttgaagcacttgggctgcttaaaatggattttctgggtttgaaaaacctcaatattttagccgccgccagtcattttgtcacccgtgatactggccggacgtttgatccaaaacagattccgctgaatgatcaaccgacactcgctttgtttgcccgcggtgatactaacggcgtttttcaattcgagtctgctggtatcaaaaatgttttgcgcaaactgcggccaactgattttgaagatgttgtggctgtcaacgccttgtatcgtccaggtccaatggaaaacatcgacacgttcattgcccgcaaaaatgggcaagaaccgattgcttatcctgatccggccttggagaagattttgaaaccgacttatggtgtcttggtttatcaggagcaggtcatgcaggtggccagtgtcatgggcgggttcagtcttggcgaggcggatttgttgcggcgcgccatgagtaagaagaaatcatcagtgctggcagccgaacaggataaattcattgaaggtgcggtcaagcaaggattccctgaggcgactgccaaaacggtttatgcttatattgatcgatttgcgaattacggcttcaatcgttctcacgcagttgcttatagtatggtcgcattttggttagcgtatttaaaagtgcatgatccagccgccttttttgcggcattgatgaatgctagtatgaataatttgccgaagctccggacttacgtacaagaagccaaagcgcgtcaggtagctttattaggtcctgacatcaacaccagcaatggtggctttaagttgagcgacgggaagattcgctttggacttttgtctgtcaaagggatgcgccgtgacttttccgaagccatttttaccgctcgtaaaaatggcccgtttaaagattttcgcgatttactacagcgcctcgagccgaagtggttaaaggcagataatttcaaaccattgattcttgccggtgcctttgatagctttgatgataaccgggcacagacaattgcgaacttagatgaattaatcaactcggttaaacttgctggcaatgatgttgggttattttcagtgctagcgcctaaaccgattgtggtgccggaaatgccggcaggcgaacggcttgaagaagaggctaatgttttaggcgtttacctttctggtcatccggttgacaaatatgcccctttgaaaacgcaatacacattagtcaatgtggtggatttagcagaaggtcgcacggttgatattttgcttctggttcgacacattaagcggatccggaccaaaactgggaagcctatggcgtttgtggatggacaggatgcgactggcaccgtttcgctgacggtttttcccaatctatatccaacattagaaaaaattgagaccgacatggtggtactagtgaacgggcgagttgaaaaacgcaatgacgacttgcaactcattgtgaaccggattcaagatgccgcaccgttacttgaggccttaccaaaagcacagttatttattcgcttggatgcggataatgttgacgcccggaccgatttactgaaaaaattgcaaactgcccatggaccaattccggttatcactgtcgacacgaccagcaaggagagcgttttgctagataagcgatactgggtcactgctgacaccagcttgatggctgatcttgaatcgcggtttggtgcggctaatgtggtgttgcgaaaacgacaagaagaatagagaaaattgtaaaatgttctcattttcagggactttgtttctgaaaagtggtaaactcaatgagtatttgtgatgggacaaatcgcaaaagaatatgcatgaggtgaaataatgaaacgcattggtattttgaccagtggcggggatgcgcctggcatgaacgccgcggtccgcgctgttgctcgcaaggcgatgcacgaaggccttgaagtatatggcatcaattatggatttgctgggttagttgccggcgacattttcaaaatgaatgaatcaactgtcggtgataagattcaacgcggcgggaccatgttatattccgcacgttatccacaatttgcgcaagaagaaggccagttgcgcggggtcgaacaattaaacaagtttggcatcgaggcgttggtcgtcatcggcggagacggctcttatcacggtgcactagctttgacgcgtcacggtttcaacaccattggcctgccaggaacgatcgacaacgatattccttacacggacttcacgattggctttgacactgccgttaatacagttgtggaagctgttgaccgtcttcgcgataccgcggcttcacatgaacgaacctttgtcattgaagtcatgggtcgtgaagctggggatattgccctttggtcgggcgtcgccggtggtgccgaggatgtcatcattccagaacacgactttgacgttaagaaaattgcgtcgaagttgcaaagttctcgtgaacgtggtcaaaagcatgcggtcattcttttggcagaaggcgtgatgcacgctgatcaatttgccaaggaattagccgcacatggcgatttccaattacgttcgacagttctgggacacattgttcgtggcggtgcaccgtccgcacgtgatcgcgttttggcttcacaaatgggttcatacgcggttgaacttttgttgcaaggcaaaggcgctttggctgtcggcattgaaaataacaagatcacggcacatgatgttcggaccttgtttgatgccaagcatcacgcagaactttcgctctacaccttagcggaagagttaacattttaatctcgtaaacaaacgacattaacgtctgtttaaataatttcaaggagcgatttcacttatgaaaaaaaccaagatcgtcagcacgcttggacctgcaagtaacaccactgatatcatcgttaagttgattgaagcgggtgccaacgttttccgtttcaatttctcacatggtgatcatgaagagcatttggcacggatgaacatggttcacgaagctgaaaagatcacgggtaagaccgttggtatcatgctggatacgaagggtgccgaaattcggacaactcttgaagataccccgaatggtaagatcgattttcacaccggtgacaaagttcgcatctccatggatgcaagtctgaaaggcaccaaggaaaaagttgctgttacctatcctggcctttatgatgacactcacgttggcggccatgttttgtttgatgatggcttgattgacatgaagatcaccgaaaaggacgaaaagaaccgtgaactcgttaccgttgttcaaaacgacggtgtccttggtggtaagaaaggtgtcaacgctcctggtgttgccatcaacttgcctgggattacggaaaaagactccgatgacattcgtttcggcttggacaacgggatcaacttcattgctgcttccttcgttcgtaagcctcaagacgttttagacattcgtgaactccttgaagaaaagaacgcacttaatgttcagatcttccctaagatcgaatcacaagaaggcatcgacaacattgatgacatcttgaaggtttccgatggcttaatggttgctcgtggcgacatgggtgttgaaattccatttgaacatgttccgatcgttcagaagcgcttgatcaagaagtgcaactctttgggtaagccggttatcacggctacacaaatgttggattccatgcaagaaaacccacgtcctacccgtgccgaagtaaacgacgttgccaatgccgtgtttgatggcaccgatgcaacgatgctttctggcgaatctgctaatggtgactatccggtggaatccgttgctgcaatggctcggattgacgaatacaccgaagcagcgatgatggatcaggatgccttcgcattgaaggaatacagtaacaagaacgtcaccgaagctgttggccaaagtgttgcacacacggctcgcaacttaggggttaagaccattgttgctgcgaccgaatccggctacactgcccgcatgatttccaagtatcgtccgaaggctgacattcttgccattaccttcagcgaaaagactcaacgcggcctgatggtcaactggggcgtttacccaatcattgctgaaaagcctgctaacaccgatgctatgttcgacttggcaaccaagaaggcccaagaccttggctttgctaaggaaggcgatctgatcttgatcactgccggtgttcctgttggtgaatctggcacaaccaacgtaatgaaggttcaactcattggctccaagctggttcaaggctcaggtgtcggcgacgaatccacgattggtaaggcagtcatcgcaagcaacgctcaagaagctgctgctaagatgcaaaagggtgacattctggttgttaagacgactgacaaagattatttgccagcaatcgaaaaagcagctgccttggttgttgaaaccggtggcttgaccagtcacgcagctgttgttggtattgctatgggtatcccagttgttgttggtgctgaaaatgctaccagcgtcatctccgatggccagatcattactgttgactcccgtcgtgggatcatctacaaaggtgctaccaacgccctttaatcttcaaaatgacctgttaaaggttaggaaaaactctcaaggaaacttgggagtttttttcttccaaaaaaacagtagcgttgcctgttttgagcaacttactgataaatgtatgagcagaggtcgtcaggtgcgtgcgagtggcttataataagaaacagtatgcaatctcgtaagcgataacgctggcagtatggtcagcatcatgatggagggaacacttgtggagagttggctttttttactaggtattttagcaattgcaattgtcggcaaaaataaaagcctgataattggggtcagtgctgtgatggttctcaagctgatcccgcaaactcaaaactttttgaaattgcttcagacgcaagggatcaattggggcgtgactgtgatttcggccgctattatggtgccaattgcaaccggtgagatcggttttaaagagcttcttaatgtcattaaaagtccggctggctggattgcgatcgggtgcggcgttttagtcgctgttttgtcggcaaagggtgtcggtctgctggcaatgagcccggaaatgactgtggcattggtttttggcacaattattggcgtcgtgttcttaaagggcattgcggctggaccggtgatcgccagtggcctcacctatgttatcttgaccgtttttaatcttgttcctggacattaatgaccggcaactatggcgctcgtttaaggagaaaaataaatgaattttaatggcagtattgtcaccgcacaagtgacggatcacaatgacacggaagtctttgctcagcatgatggcgtcactttggccattgatcgcagtgagttggctgaacttccagaagttggcagtgatgttgagggttttgcctatgaaaataagcaggggcaggctcgtttaaccacaaaagttccgacagttggccgcgaccattacgcttttgcaaaagtagtcgaagtgcgtaaggatcttggggtatttgtgaacatcggcttaccagacaaagatattgtggttagtgaagaccagttacctgaaatcagccgtttatggccgcaaaaaggcgatcaattaatggttgccttaacagtcgacaaaaaagaccggatgtggggaaatctggctgatgaaagtatcatccacgcggttgcaaatcgcgcgaagcctgagcagatgaatgctgatgttactgccacggcttatcggttgaagatggctggaacgcgtgtcttgaccgatgatttttatttgggttttatccatccaagtgagcgcgatgctgaaccgcgacttgggcaaattttgcatgctcgcgtgatcggggttagtgctaatggcgagctgaatttgtcgctaaaaccacgtgcctatcaggccatcggtgatgatgctggcatgatcttggcagttttgcagcatgatccttcaggaaaaattgcttatacggataagagcgatcctgaagcgattaagcaaacctttggcatcagtaaaggcgcctttaagcgcgcactgggccatttgttgaaggctggcttagtgaaagaggaagctgggtatacgattttgacggccgcagctaaggcgtctcgggagtaacatcatgcatgggttgatcgcggattttattcattatctaaatgttgaacgcggattggcaaaagccacccaaactagctatcagcaggatttgatcactttttcggcttggctagcggcccgaaaaagaaggacatttcctgaggagttcggtaccatccagtcctttttaaaggagcagaatgccaccaaggcgcctgcttcagttagccgcatgatttctgctttacgcaagttttatcggtttttactgcgtgaaggggcaatttcagctgatccaatgaccaagattgacaccccaaaacgtgcccaacatttaccagcaacgttgtcgagtcaagaagtcgatgctttgatggccaaaccagataccgacaagccattgggattacgtgatcgcgctatttttgagttgatgtatgccactgggttacgggtttcagaagttgttgatttacgtcttgatcaattgcatttggcaatgaatctacttcaagtgactggtaaaggggacaaagaacgactggttcccattagtccgcaagccacacaatgggtggatcgctatctgcaagaggccagacccaaattactcaaacgagtacaacctaaaaatgtttttgtcaattttcacggtgggccaatgactcgccaagggatctggaagaacctcaaagcatatattgcaagtatcggcattgaaaaagatgtcacaccgcatactcttcgtcacagctttgcgacaaggttgctcgaaaacggtgctgacctgcgcgtggttcaagaactactcggccacagcgacatcagcacgacccagatttacacccatttaagcaatcaacatctagttgcggtctatcataaaacgcatccgcgcgggtagctattttgacagggtgttcctttctaagaatatgtttgatgactaagagattgtggccatcagcattgccatgggcagtctagctcgaatactaagatagaaagcagagcgttggcggagccaaatcggacaatagaattaaacttgattagcgtagaaccgagaaaagcttgacacatacgttcacgctctgccctttgctactgccgcgtttctatgatagagtgttacgagagtatctcttggaggcaaacatgctggttaaatacaaaaacgactatgagaagatcgcgatgggattgttgtcttttattccggatctgaaagatgtcgggcatttaaagacagaactcaagatgtacaccgaagatgattcccatgcgttgtatctatacaaacataagaatgattttgttggtgtcgttggcattgaactaagtgctgactttgttttggtgcggcatttaagcttttcacctaattttcgtgaccaagcaacggcatttgccgcgttgactgaactgactgaacttttcccaaacaagaaattgatgggtgcccttgaacatgcaccgctaatcgccgcctttaacaagtttcgaaaagaggatgaccatggcactgacactcgtgctgaatgacttctccggaccgttagacttgctttggcacttgattcggacgaatgaagttgacatttacgacattccgatcgctgagatcaccgctcaatacctagattacctgcatcaaatgcaggatctggcgctggacgtggccggcgattattttgtcatggccgctaatttgatggtcttgaaaagtcgccttttgttgccccaacctgaacccgaaacgatggctcctgatgaggcgccagatccacgagcagatttagtggcacaactattgacctatcaagtctaccaagaagcagcaaaggatttgaaagcacgcgaggctaaacgcgcacaagcctatgccaagccaaccacattgccagacgccaaaatggctgtgccacttgcgccaggttcggtgaaattagttgatttacaagcggccatggcgcgtgtgatgaaggcacaacaagccactcgccaaaccattgcccacattgaaaccgaacctgtatccgttgaaaaacgaatcggcgaagtgctacagacattgcaaaaaggcgggcaatgtctctttgctgatttactgtcggttcagtcggttgagcaggttgtgacgacttttctggctttgcttgaattgatgaaaaatgatcaggttatttgtgaacaagaggcgccatttgatccaatcacagtgaccttgaaggaggctgcttaatggagccagcactagaagcaatcctttacacagctggcgaaagcggcgtgacgctgggtgagctggccggcattttagaaatcagcgaaagcgcgatgcgacagcaattagacgcgtatcgacaacggctggctgctgatgatcagcgtggcctgcaattgcagcagtttgcggaccggtattatttactgaccaaaccagcgtacgcacctgcaatcaagaaatattttgccgggccgccagctgcgggattatcgcaggctgcgttggaagtgctcgcgattatcgcgtaccagcaaccgattacccggattgaaattgacgaaattcgcggtgttcaaagctcaggcgcattaactaccttggctgcgcgacaactcatcaaagaggcaggccgaaaagaagcccctggtcgaccaattttatatgcgacaactcagtttttccttgactattttgggttgaaccgccttgctgatttaccaccgctagctgatgcgcctgccgacacaggtgaggttgatttgtttacggcatttcggcacgatgatgatcaagaggaagctactatagacgaaaagaaaatggagcaaaatcaacaacatgacaaccaaaactgaacggcttcaaaaaattatcgcaaatgccggtattgcttcgcgtcgacatgcggaaacgttgattgcaactggccatgtcaaagttaatggccaaattgaaactgaaatgggcatcaagattggtccgcatgatgaagtcgaagtggatggcgtgccgattggcaaagaggctaagcgctactttctcttttataaaccgcgcggcgtgattagtgctgttcaagataataagggacgtgatgtcgtcaccgattactttaaggatattactgagcgtctttatccagttggccgattagattacgatacaagcggcttacttgtgatgacaaacgatggcgatttagccaaccatttgatgcatccacgttacgcgcttgagaaaaaatatgtagccaaggttcaaggtgtaccgaatcgacctgccttggctccgctcaaaacaggtgtcgaggttgatggcaagatgactgcgcctgctaaagtagacattatctcgactgataaggctaaaaaaacggcgatcgtatctttgaccattcatcaaggcatgaatcatcaggttaaaaagatgtttaaagcagtcggcttcccagttctaaaactatctcgggaagcgtatggcaacttaactttggtggggttacagccaggtgaacatcggccaatcaagccgcaagaactgcaagccttgcgaaaactagcgggtgaatcggaaaataagtagttggtgaaattgttaacgctttcagtgcaaacgcttgaacttttccggtgcctttgctaaagtaaagctgttaattaaataatcttggttcgtcttcagggcagggtgcaattcccgaccggcggtatagtccgcgacccgcttatgcggtggaaccggtgtgactccggtaccgatagtgatagtctagatggaagaagatggggcttttttgaatctacattcaatcaagacctattccccctgaaggaggaataggtctttttaagttccggaagacggcctcacggaggtaatgttttatggcaagtagttccaaggttcaccgtttggttggtatcgcgttgttagcggcgatcgggtatgttttgatgatgttttcatttccgatcattcctgctttcccgttcctgaagcttgatctatcagatctggttgttttgcttggtgggttattatatggcccggctggcgggatcggcgttgcatttatccggagtcttgtgcattttgctttaacaggcggcggggtcgtcaatttaattggtgatctggcagctttcattgcgagcgttgggttcctgcttccagttgtttacacgattcgtggcaagcacagcttgttgcggcaaattgaaggtctggtactaggtaccgcaagcctgacagttgtcatgagtgtgctcaattggctggtgatcacgccgatgtacatggcggtcttcaattttaaccttggtatgtcgctgacgcgttacgttttaatcggcgttgtaccattcaacttaattaaaggaattgtggtctcggttgcattcttcgcgatcgccaaggccttggcaccgtggttagctcggcgtgagattcaacctagtcattaatgatttgatcaatcaactaaaaaacatccgtcagctttgttaagcgacggatgtttttctttagcgtaaaatcgattgtcttgcgacgaatcacgtcaatcttcctattggttcgcgtaatctgaaactatagcagttaagctttccccgtctcggaaaacgggcgcgcgttgaacggttgatcgctacgtttgatagcgtgggtcgggcagcgttggtaggccaatcgaaagtcgatcgtggcctgatcatttaaaggctcagtgccggtgttgcgatctggtttataataagcaatgccagcttgatcgtaatcaaaaagggcaggtgccaacatctgacacaagccgcaagcaatacactctggacgttctactctgccatataaagccatattcaaactcctttatacgatacataacacttaaacagcaatgttgagaaatgaggtgacaagctttgctgaccgattttgtgattcaatttttcagtgagcagccgcggcgtgagcgggctgtttttggactcttaactggtaagcagaccatttcaatcctttacgccgccttgattcaccaacaactgcaatggttgcatctttatccaagtctgtcaaaagaagctttttcagcggccatcacgacgttgaaagtgcaaagaatgctgcgtgaaactgaaaccggcttgattttaacggaaaaagggcagcatctcaagcaagcagcagttacccagttaccgtttccgacacattatcagccgtggatgaacttaccggtgttcgcaccgcggttcttcttaggcgtgcaagtgctttctgaggcgagttatgcgaaccgtgcttatcaaccaataagtgttaattgggcgacacagcaagttgtgaagcagtggtatcagcaggtcgatcatcgagctgccgttataacattaagcagcctttttcaaagactgccgactgaattagctgacacgttagcggctaacatgattggccatgactacgccggacaactgatgccagcaacattggaggctcactttgaacgacttgatgcgctagcggcactggttcagcaactcgctaatactaggagtatgtggacggcgttgtggggcggaccccgcgatttcgtttcgcgaccggcgcagcagaccttggcgcaagcacgcgctggcatggcgttgccaacaattgctaatcgcagccaccgtaagcaaagcacgattaatgaacatctgttgctcgcggcaattatgggtgaaacgttgccgattgagcatttggtgccgcttaaaattcaccgtgcacttgatcgggtgacgcaaatctacgatcatcaggcattgttggcagccattcctggaagtactttttttcagattcgactgttccagattctaagttttcaagggaggtggccgcgtgtcacaacttgaagcacaacttcaacaacattttggctttcaagaatttcgacctggacaaaaggctttgatccaatcggtgttggatggacatgacacgctgggaattttacctactggcagcgggaaatcactctgttatcaattgccgactttgatcagtaacaagccaagtttaattgttgaaccgctcattgccttgatgaatgatcaagttggtcgtttgcaagcagctggagaaaaacgggtcattgccttgtcagcgcaaatgccaccggttgcttttacccaaattctcaaacgattggcaagttaccactatatttttgtctcaccagaaattttacaacgcgttgatgtgctcatggcgctcaaacgactggccctaggcttatttgtggtagatgaagcgcattgtatctcacagtgggggccagattttcgacctgcttatttgcagctgggacaagttcgccaacaattgcaagcagatgcgattcttgccttaaccgcaaccgcaccggaacccgttcgccgtgacattgtccaacatctaagcatgcaatcgccagcaattttggctgggtcagtcgatcgaccaaatattttccttggcgttgagaccggcttaacagataaggaaaaggctttaagactggatcagttattgcacgaggtggtggggccaacgatcatttatagtgctacccgagccgcgtgtgagacgttagcgatacgattgcaaaaagccggccatgctgcggccttttatcatgctgggttggatcggcaccaacgcgatctaatccagcgacagtttcaatcggatcagttgcagattatctgtgcgacgagtgcgtttggcatggggatcgataaggcaaatgtacggttcgtcgtgcatacctatgtgccggaatcgcttgaagcttattatcaggcaatcggacgagccggccgtgatggcaagcagagtctagcggcgcttttggtgaccgatcatgatgttcagcacggcgctattttggcggggatgttgccagatgcggcattgattcggctcatctatgcgcatcctgaggcgtatcgcacttttgacgatccgcagatcaacctgatcgaagcgtatgtagacgctggcttttcggtagaggctacgcagcagcaattacagcacagactaactgagaaacaggctagtttcgcagcgatggcggcttttgttaatgaatcagaatgccgtcgtgctgttctgctgcaacattttgattcgccaattgaaccgcatacggctttgtgctgtggtgagatcaccactacgatattgcgccaactacagcctgaagtgccacaagaacaaccaaaattagcttcttggcaggcagtatttcaccaaatctttagataaccgacgccctgacgctggtcaatatgatacaataagcgcagtagtgagggggatcgtgatggcggaaaaagatgaacaccaacatgacaatgaggatcacaagcgcaccaatggtgaggatccaagtaaaccttgggaaacgctgtttgacgatgatcgtgatgatcaaggtaatttgagccgcgttgccaccaagaaaaaaaggcaaggaagttcaaaattgacctggattttagcgatcttgttaattcttgtggttttggcaccaattatttatgtcaaaatttctggtgatcaaagccgcaatggcgctaacctttctaatgatcgcgttgtgatccaaagtactaaaaagagcagtaaagtttcaaaatcaaagaaatcatcgaaggcttccaaagcctcgaagacttcagtggcctcgtcacaggcagcgtcgactcagcctagtcaagcaccaagcgttacttcccaacaagaagaacagaccagtgcatcagcgcagcctagcgagcaagcaagtgccagcacggctggcagttcatataccgtgcaagcaggcgataacctttatcgaatcgctgtcaatcatggaatgaccttagatgagttgctccagatgaacggtatgagtgcgggttccagcattgcaccgggcacggttttgaaagtgaaataatcatgacacgaccctgttctgcatgcgtattggcatgagcagggtcgtgtgttgtggaggaaagtatgcaaattgcgatcgacggcccggccagtgccgggaaaagtaccattgcgaaacgagtcgccaaggaattagggtttatctattgtgacactggcgcgatgtatcgcaccgtgacctacatggccattaaagaccagctgggctttggcgatgaggcggctatcatgcagcatctcgccaacatgacgattcggtttgaaccgggtgaccctgaacagcgcgtcttaatgaatgatgaagatgtgaccttagccattcgcgaaccagacgtgaccaacaatgtttcgcaagtgtcagcgttgcctaaggtacgcactgaactagtgaaacgccagcgggatatcgcagcatctagcaatattgtcatggatggtcgcgacattggcaccaccgttttacctaacgccgaagtgaagatttatatggtggcatcagttgctgaacgggcaaaaagacgctacaaagagaatattcaaaaaggcattgagacaccactagctaccctcgaacaggagattgccgaacgcgatcgcaaggactctcatcgggccgtttccccgctacgtcaggcttctgatgcgattagaattgatacgacatcaatgaccatcgatgaagtggtggaacgaattttatccctgataggccaagtaaagacgaaatagtcaagggcttaaaataataggtggtaatttggttcgttttcaagtacaatagatccagtatacagctgcataggaggattttttggcatgagtgataataacgttaatgagaacaccgaaacaatggcggacgcccttaagagtgtcaccacagtaaagattggtgataccgtcaaggcagacgttcttgccgttgaagataaacaattgatcgttgggatcgaaggaacaggcgtcgaaggcgtggtcccgatcaaggagttatcaactcagccaatcgatgacattcacgatgttgcaaaagtcggcgacaagcttgatttagttgtgctttcaacggttggcaaagataaagaaaatgggcagttcctgctgtccaagcgccgtttggaagcgcaaaaggtttggaaagaaatccaagctaagtatgaagcaggtgaaaccatcaccgctccggtcaccagcgtcgttaaaggcggattggttgttaatgccggtgtacgtggcttcgttcctgcatccatggttgaagatcattttgttgaagatcttagccaatacaagggtaaggaactcgaattcaagatcattgaaatcgaaccaagtgaaaatcgtctgattctttcacatcgtgcgattgttgaagccagcaaggctgaagcacgcaaggaaatctttgcgaagattcaacctggcgacaccgttgaaggtaaagttgctcgtttgaccaactttggcgcctttgttgatcttggcggcgttgatggtttggttcacgtttcagagatttcgtttgatcatgttgacaagccaagcgatgttctgaaggttggtcaagaaatcaaggttaaggttctgaacgttgatcctgatcgcaatcgcatttccttgtccatcaaagcaacgttgccacaaccttgggacgacattgaagaaaaggcaccggccggctctgttttgactggtacagttaaacgtttgaccacttttggtgcctttgttgaagtcttccctggtgttgaaggtttggttcatatttcccagatctctcacgaacacgtagcaaccccagcggatgtccttaaggaaggccaagaagtgcaggtcaaggttctttccgttgaccctgatgcacatcgtcttgctttgtccatcaaggctttgcaggaacgtccagcaggctctgaagaagaatctcatgaaggcggcaacagcagtcgtgacaatagcgaccgtggtgatcgtcgtcgttcttcacgtcctcgtcgtggcaatgatcgtcatcaatccacgtcgattcctgctgaatatcagcaagatgattcaggcttctcacttggcgacatcttaggcgatgccttgaaagatgctgctaagggcaatgatgatcaggatgataacaagtagtcatcttgaacctaaaaagttgagccttggctcaactttttttatgggaaacaaatcccatgacgccgtcacagaaaggaggccgttttatggtcttaccaacattagcaatcgttggccgtccgaatgtgggcaagtcaaccatttttaaccgtattctcggtgagcgggtttcgattgtggaagatacgcccggggtcacgcgtgatcgcatctatggcaagagtgaatggcttggtaaagaatttgctgtcattgacaccggtgggatcgacttaggcgatgaaccttttttggcgcaaattaaggatcaagctgaaattgccatcgatgaagccgatgtcatcctttttctcgctgatattgaaagcggggtaactgatgcagatgaacgggtagcccagattctttatcgggctaaaaagccggtcgtactggcagtcaataaggttgataaccctgaacgtcgccaagatatttacgatttttattcattaggttttggcgaaccctatccactttctgggacccatgggattggccttggtgatgttttggatgctgttttagcagcatttccatccgaagataagtcagttgaagacgattcgattaagttcagcctgattggtcggccaaatgtcggtaaatcgtctttagttaacgccattcttggtgaaaatcgggtcatcgtgagtccaatcgaaggcacgacccgcgatgcgattgatacgaagttcgaagcagttgacgaaaccttcacgatgattgacacggctgggattcgtaaacgtggtaaggtttacgagaacaccgaaaaatacgcggtcatgcgtgcattacgagcgattgatcgttcggatgttgttttgtttgtcatcaacgccgaagaaggtatccgcgaacaggataaaaaggtcgccggttatgcccacgaggccggtcgtggcatcatcatcgtcgtcaacaagtgggatacagttgagaaagataatcacacgatgaaggattttgaaaacctgattcgtcaggaattccaatatctggattatgcgccgattatttttgtttctgccaagacgaaacagcgtttacagagcttgccagccatgattgtggcagtttcagaaaatcaaactcggcgaattcaaagcagtgtcctaaatgatgtcttaatggatgccattactgttacaccgacacctacagttaacggaaaacgcttgcggatttattacatgacccaagttgctgtcaaaccgccaactttcgtggtttttgttaatgatcccgacctgctgcacttctcgtacgagcgattcctgattaaccaattgcgacaggcctttgatttttccggtacaccgattcacatcatcgcacgtaaacgcaagtagttcggcgatggctgaatattgtcttttcatttaaaaaaatatgtcaaaaatcgtgattttcgataaccgatccttgatcagacagcaaaaagtttggcaaaaaccttgtcacaacgggcttgctatgctatgtttaaacctgaaatggtgatacatattatcattgtttcttcattcctgagaggtcaggaatgggcatgtttaggtgttaacgcatctaatcaatatggaggtgaaatgttcatggcaaacaaagcagaattgatcgaaagtgttgcaaccgcaactggtttgaccaagaaggatgcaaccgcagctgttgatgcagtattcggttctatccaagactccctttcaaagggtgacaaggttcagttgatcggctttggtaacttcgaagtgcgtgagcgtgccgctcgtaagggccgcaacccacaaaccggtgccgagatcaagatcccagcatccaaggtaccagcattcaagcctggtaaagcactcaaggacgccgttaaataagcggttcacctgaggcaatgatgaaacaaccaaaaaccgagtctatctggactcggtttttgcgcgttttggcgtcattcgccagcgaccaggggcgggacgagcgacaatagcggtatgcgcagtcaagtgttgctggagagcttttgatgctcatcagttcggaatcagcaaaacgcaatgttaaactagcagtaacgacaatctttaggctttttataaaatgaaatcaacggaggcagccatgagttacgcaaaagaaatgcttgatgccattgaagctggccagatggaaacggcgaagcagctattcacccaagtattggcccacgatgacgacgaaacccaatacaaccttgccgaagaactgtatgcgcttgggttcaacggtcaggctaagcggctttatcaagggctcctagggcgatatcctgaccaaggcgatctggcgacggctttagctgatattgcagtttctgacggagatacagacgccgccttgaattatcttagtcgcattcagccaggtgatcctgcctatgttcaaagtctggtgagcgctgccgacgtctatcaaacacttggtttatatgaggttagtgagcaaaaactgcttgaggcgaagcgattggcgccagacgagccggtggtgaccttcgctttaggcgaattctattttgactggggtcattttgccgaggccattagtgcttataacgagctgctagcggccggtacaactgaacttgctggggttaacatcgaagcacggttggcggccagtttagcgcaaacagggcagtatgaagacgcagtggctgcttatgaagatgtcggtgttgatgcactggatctcaatggccggttcgaattaggtggcttgtatttacaacttgatgatccggctaaagcgatcaccaatcttcaagccgtgattgacagtgatccaagttacgccaatgcgtatttgccacttgctcgtgcttatgaggcccagaatcagcctgacaaggccttagacacggttcaatccggcgtcatggtcgatgatacgaacccaacgctatatgccttaggcggcaaattagcgcttagtgaagacaatgtcaaattagccgagacgtatttacaaaaggccttggcgattgatccggaagatcaaggtaatatgctcgcttggagcaactttttggtgcaggaagagcgtgatcaagaaaatgttgactttcttgaccaaatcgatcgtagtggtgatgttgacccacaaatttattggaatatggctaaaagctacgatcggttggagaatattaaaaaagcccgtgagaattaccttttagcgttcaatcgctttcaggattccccggactttctccacgatatcattgatttcttccagtcgactggtgctcgcgccgaattgaaagccgctttagtgcgatatttgaaactggtacctactgacgacgagatgcaggcccgtttggatgaactcaacgccgagacggattaatcgttgcgaatcaatgaccaaatagtagtcggcggcgttttttctggtaggtgaagccttcgcccaaggcctcatggacatcaaggatgctgatgaaggcgtgcggatcaatggcctcaatcagccgttttgtttgggcgatttcagttgacgaaacgacagcataaacgacctgcttgcgatcgtgggcgaacccgccttcagcatgtaagaaagttgtcccacgttccaattcgttcataatggcagtggcgatttcttggcttttgtcagagacgattaaaaggccctttgccgcgtaagcaccatccagcgtaaagttaacaatttgtgagaacacgtaggcaccaagcagagtgtacatcatgagttcgatgttcagatacgtcaacgagatcgttagcacagcggcatcgaaaaccaacaaggttcgtcccattggcacgccggtctgttgttcaactatccgggcaacaacatccgtgccgccggtggtcccgccatggcggtaaatcaagccgctgccaaaaccaccaaacagtccagctaaaaccccggagataaaaagatcatgatcgaggttgatggttaaaggtacccgttgccagatccacagccaagcagaaagcatcaaggtgccaaaaacagtgtaagctagggcgcgtttgcctaaaaatttgtaaccaacgatgagcaacggaatattcagcagaattgtgctgtatgccggatcgagatgccaccaatagcggattagcagggtaatcccggtgacgccgccttcagccaagtgattcgcaatattaatataaacaagcccgaacccatataaagcacaaccaagaacaatcattaaaagatcccaacaagtacgcgtggtgcgtgacataggccgcctcccaaaaaagaatttaagcttattctaacagaaatgtcatatttcggcttaattgtggtaatggtggttgccggtttggaaaaaggagtttgaaatgcgactagatttgacccagccagattttaaggcagcgattccgattttaaaaaaaatcgaagctgctggttatgaagcttattttgttggcggcagtgttcgtgatgcgatactggggctgccgattcacgatgtagatattgccagttcggcgtatccggcagaaattaagcgaattttcaagcggacagccgataccggcatcgagcatggcacagtgatggtgcttgatcacgggactggctatgaagtgacaactttccgaaccgaatcgcgctatcaggattttcgccggcctgatcatgtgacttttgtgcgctccttagcagaagatttaaagcgtcgggatttcactatcaacgctttagctgttcggcatgatggcacgatcattgatttgtttgacggcctgaaagatttgcagcaccaccagctgcgggcagtgggtaatcctcatgaacggtttcatgaggatgctttgcgaatgatgcgggcagttcgattcgagagccaattggggttcggcattgagccagccaccaaagcggcaatcgccgacaatgccaaactgttagtgcacatttctgtagaacgagtcgccgcagaatttaatcggttgctgactgggattgatcgacgtgctggcttgcaagattttattgagactcgcttgtttgcctacgccccgaaaatggcggctcatgaaacagccttaacgcaattttctcagttgcctgatacgcagctgaccagtttggcaagcggctgggcggcattgattttccttttaagaacacagccgctggtgatgctaaaggcctggaagcaatccaatgagctgatcaccttggtcacgcaaactgtcaagctactgcaggtgatgccgaatccgactgcttgggatctttaccaagctggtgaagcggccgtgacaacggctagcgaggttcaaaaactgctgacgcctgactttgatcagcagcagctagctgaggcttacgcggccttaccgattcatagtaaaaaagaattagcgctgaccggtgcagatctgattaaagcgggggtccgtcccgggccagcgatgggcaaagcactcaatcaaatcgagcagcgtgtcgtcgctggagctttgccaaatgaactaaaaaagttgttgccgatcgcaactgaaatgtctcaagatcgtttgtgagtgtgttatgatgagcatgtaagcacattcaacaacgtcaaacaggacgattgatcagctgggcggctttaaaatagcatagttggccaccagtgcgtttccaacccgttctgcatgacagtgaagggggatttccaatggcagaacatgtttttgagcaattgatttttcattttcgtaacggtgacgaatggactgttgagcatgatgaactggcggacgtctggatcagtcgagtaaccacaagttacggacgcattcacggcggtcagattcaagagattcatccttgcaagagctttaaggttgagattttgcctgaagctgaccacgtcaagtcaagcgatatcaacaccggttcgctggagatggggatgtttggtcgcgccactaagtatcaagatattgaaaagatggacttggtcttcaatgcggaagacaaaaagcgcgttcaaatctacttcccattcaagcaaaaggatccaagcgggcttgataacgagtaccagagtagcaagcttgcagcaaacggtcatctttatattgtgatcgatgaaaaacataccgtggatgatgaatatccgcggatctaatcgtgatcacgtacgggtcggcattgatgtcggccttttcttgtgcgctgcttcttgctaagatggacaacgatacgagtgaaatgagggacaacatgcagacgctaacagcgcaaggcctgagtaaggcatatggtgacaaacaattattcaatcagattgattttttaattaacgaaggcgagcgaattggcttaattggggtgaatggcgctgggaaaaccacgcttattcgcgcattagccggacttgattcagttgatgctggtgaaattaaaacacccaagcaatatcgcatcagctatctggctcagattcccgatcttgatcctgacttggcgattatggatgccatttatcatggtgactcaccggtttttcaagcgattcgccaatatgaacaagcactagccgaatataccaaggatcctatgaatccggaaaaaactgccgcttatacaaaagcagatgcccgcatgacgcaagaagatgcctggtctgcagaaaccgatatcaaaacaattttgacgcagctgcacattgatgatttgagcatgcgtgttggcgatctttccggtggtcagcaaaagcgtgtcggtcttgcccaagtgctgatcgaatcgccggacttattgctgttggacgagccgacgaaccacttggatttcgattcaatcgcgtggcttgagaagtatctcagcaattatcgcggcgctttggtcgtggtaacgcatgatcgttattttcttgatcgcgtgacgaaccggatttttgaattggaccgcggccgtttattccagtatcaaggcaactatcaggcttatgtcgccaaaaaggctgagcaattggaggccgaaaagtcggctaatcacaagcaggcccagctttacaagcaggaactagcttggatgcatgctggtgcccaggcacgttcaacgaaacaacaagcgcgcatcaaccgctttcagaccttgcaagctgccaaagatgcggcaccggaagcaaaccagcagttggatcccattcagatcgccagcgcccgcttaggcaaaaaagtcatcgaaatgcatcatgccagtttgcagtttgacgatcagccgattctaaaagactttaattggctggttcaaccaggcactcgcattgggattaccggcaaaaacggcgctggtaagtcaacattgctgaatattattgctggcaaacaaaaattggacagcggatctattgaattaggcgagaccgttcatttgggctactacacccagatgagtgccaatttggatccgaacaaacgcatcatcacctacttgcaggaggttggcgaagaagtcgtgcaagcagatggtcaacgcgtgtcagtaacccaaatgctggaacaatttctttttccgcgcagtatgcatggtacgctgattggtcgcttgtcaggcggcgaaaaacgccggctttatttgttacaggtgctcatgcgtcaacctaatgttttgcttttggacgagccaaccaatgatctagatattgccaccttgaccgtactcgaagattatctggatcaatttccaggcaccgtcatcaccgtgtcacatgaccgttactttttggacaaagtggctgatcaattgctgatcttcaatggcaacgcgcggattgaccgagcggtaggcgaattctctgattatctggctcagcaacaaaccaagcagccggcagccaaaccaaaaacatcagctactgacgctgtaccgaaaaaagccgcgccaaagaagaaaacaaaactgacatatgctgagcagatagagtatgataaactccaaaatgagcttgacgagttggacgataaactcgccaaagtcaaggcagctatggccgaagtcaacggtgaagattatgtcaaactaggtgacttacaagcccaaattgacaagatcaaccaaacaattgataaaaaattcgaccgatttgccgaactggatcagtatgtttgaacacacgcccactggagggaagaagacaatgttagagcagccatatcttgatcttgcccaaaaagtattagatgaaggccatttcaagcctgatcgcacgcatactggcacgtacagtatttttggtcaccaaatgcggtttgaccttagcaaagggtttcctttactaacaaccaaaaaggtgccctttggtctcattaaaagcgagttactttggttcttgcgtggcgacaccaacattcgtttcctattgcagcataaaaatcacatctgggatgaatgggcctttgagaagtgggttgccagccccgattatcatggtccggatatgaccgattttggtcatcgcagccagaaagatcctgaatttgccgccagttatcgtgaacagatggccaagtttgacgaacgtattctcactgacgagtcatttgcagctaaatacggtgatttaggattggtttatggctcgcaatggcgggcgtggcataccagtcgtggtgacaccatcgaccagctgggggatgtgattgagcagattaagacgcatccatactcgcgacgcttgatcgtatccgcttggaatccagaagatgtgccaaccatggcgttaccgccttgtcacaccctcttccagttttatgtcaatgatggcaaactttccttgcaactgtatcagcgttctgcggacattttccttggcgtgccgtttaatattgcctcatatgccttgctgacccatcttgttgcccatgaatgcgggttgcaagttggggacttcattcatacatttggcgatgctcatttgtatgtcaatcatttggaccaaatcaaagaacaattaacgcggacgccacggcaggcgccaaccttggtcttgaatccagataaacacgatatttttgattttgatatgcaagatattaaattgttgaattatgatccttatccggccattaaagcaccagttgccgtttaagcgaagcacgtgcttgggctgccttgtcggcgagaaagcttattattggcgatatcgaagctgtttaagtgacggttctgactgattgcagtaccatcagacgtatcaaaaacgagggggattttaaatggtagcatttttgtgggcgcaggatcgggatggtgtaatcggtaaagacggccatttgccatggcatttgccagatgatttgcattatttccggactcagactgaagggaaaatgatggtggttgggcgtcgcacgtacgaaagttttccaaaacggccattaccagatcgtacgaacgtggttttgacgcaccaggctgattaccaggcaccaggcgcgattgtcttgcatcaggttgctgaagtgcttgattatgcgaaggaacatgcagatcaggcattagtcatcgccggtggtgctcaaatctttagcgcctttaaagacatggttgataccttgctcgtgacccgtctagctggcagttttgcaggtgacactaaaatgattccactagattgggatgcgtttactaaaacctcaagccgaactgtcgaagatcaaaaccccgctttgacgcatacttatgaagtttggcaaaagcaaaaatgatctgacgcgtttagcagctaaagaaattttttaaggaacttaaatagttatgtgcatttgtagttcgtttttttaactaaaattgactcatgtgcaaaaaagatcggcttctccgtctgacggagcgagccgatcttttttatatagttagcattaaacgaaaaggtaaattgaaatgtacatgcacaggctgccgagaatgacaaacaggtgccagatgacatggatgtaggggatgcctttttgcaggtacagcatagcgccacctgtgtatgctaacccgccagcaatcagtaaccagaagccaatcggtcctaagtgatgccacagtggcaccatgccgattaagcaaagccagccgagaatgacgtaaatcatggtttccagatgcttgaagcgattcaagaagaacagcttgtagaggatgccgccaaagcaaagcgcccagatggcaattagcaggccgatccctaatggtccgccaatcgcgaccaaacagtaaggcaggtaagagccagcgattaatatgaaaacgccggagtgatctaggacctgtaggacatggcgcgccttgctaaaatagaaaccgtggaacgccgttgaagccgtatataagatgatgagggagatcccaaatcctaagtaactgattaactcaagctgactgccactattggtgcccttaatacccaacgcaatcgtgccaaccactgccagccctaaggcaaatgcatgggttatcgcactaaacatttcattattaaattcataatgctttgattttgccacgcgcatcttctacctccttggtgcaaccggtacagatttctttacgagaattgccgggcacgcttcaattcacttacgattttagcatggtacgtttcacaatacaacttaatatagttatgataactagataatatgtactgacaatatttctggactttgctataatgagttcgataaacgaacctaacagaaagcgtggctcagacatggcaaatatcaagatcgtcacggattcttccgttcaactgactccagaagagatcagccaacataacattacggttgtaccgctgaccattatgattgataataccgtttatattgatggcgaaaccatcacacgggatgattttatggatgaaatggctgcggcgcaaaatctgcccaaaacctcgcaaccagctgtcggtacgtttgccgatgttttcgacaaactgacagcagacggtagcgaagttttggcaattcatatgactgaaacgatcagcggaacggtgaattcttcgcggcaagcggctcaaattgcgaaaggcaaagtgacggtgattgactcgcagttcacggaccgagcgatggcttttcaggtcttagtcgctgctgaaatggccgaagccggcaaagatatgaaaacgattcttgataagcttgagcaagtgcgggacaacacgacactggtccttggcgtaacgaatttagacaatttggtcaaaggtggccggcttagtcgtgtttcaggcttaatttcatcgtttttgaacatcaaggtcattctgcaactgcaaaatggcgaactgaaagccttacgcaagggtcgggggatgaagacgattaataatttcatcgccgaaacaattgccaaaatggccaaactcagcaacatcaaaagtgttggtatttcaacggccggcgctaaggaattaggtgaagacattggtcggcgcatcgcagaagtgctaccgagtgtcccgattctggtgcgaccgactgatccagtcattgcaacccatacagggccaggtgcgtttgcaattacgtactacgttgattaatttttaataaaatttaactggccggcggaagcgccggcttttttaaagcacgaacacttgtggcttgaaaacgccgtatgcacggtttcgggcatgatcaaggcaacgacagctggtgatgcctaaaacggttaggcgggcatctgcggctacttgtgccctgattttagagagaagcaaagccggcaccatttttgaatcaaactgggcgcccttgtcgactgtttttggtcattgtcaatgatcattcagacggagcgcctttgttaatttgtacaacgtcaagtacaatagcctattaataccagtcatttgaccagaaacacaggaggcaccatggccaagttaaaaagtattcttatttcattcggcgtcattttgctagccggtatagcggcttttttaagctggcaagtattcggccctgccgctgcgcccagtcaagtcaaactgacggctgatcagccgaagcaactcaagctgacggcggttggcgattcgctgacatacggcgttggtgatgccacgaataacggtggttttgttggactcactcaggccgatttggaagctaccggccaatatcaagtcacgacgaaaaactatggtgttagtggtaacaccagcacccagattcttagtcgcatcaataaacaggcgaagattcgtacagatttgaagcaagccaatatcattaccgtgacggcaggcggcaatgatctgatgcatgtgttgcagcaacattttcttagcttgtctgaaaaagagatcactgctggtagcacggcttttcagaaacatctaacgaccttactcacaactattcgtaaggagaacgcaacggcaccgatttatgtttttggcatctataatccgttttatgtttattttccaaaaatgacagcgatgactaatagcgtgagcgcgtggaatcaggcaacgcaaaagaccttgcaaggcttccaacgtgtctattacattgacatcgataaggtcctatcaaatggggaaactgtcgccaacaaggcttctgcaaaagaggctttgaaggaagcaacatctggagatggcaacccgctgatcttttcgcaagatcattttcatcctaataatgccggttatgcgcaaatgactaaacaattgatgacgaaactaacagccacaaagaaagattgggagtgattagggtgacagaaaagaaacggcagcgcaaacaaaaatcgatcagctggtcaatgattaactggtggaaatgggcatttttaatcctgattggccttatcttgggtagcggaatttggtttaccaaaaccgtcttagcgccggtttcactgaacacagccacagagactaagacgatttcaaacgacccggttttcacggttaaagtcaccaagagtagtgccaaccgaatcatggcacattatttaaaaacctatctgaaggacagcccaattaaatacgccgtcacccttggcaataatgaggcggcgttgaatggttcgttcaaatttcttggcaataatgtcaagttccaattgacctttgatccgttggtacttaaaaatggcgatgttttgctaaagtcaaagaaattgaacgtcggtacattgccagtcccgattagtttcgtaatgagctatattgggcatagttataaaatccctagctgggtcagtcttgatagtaaggcaggaaacgttgtgctaaaattgagccaatttaaactccaaaatggcatgacgcttcgggccactaaactagatccgacgaacgatgacttagagttcgcagtttacctcccggataatcagtgatcattggaaagaagctgaatattttatgaaaaaagaaacagctatttttgctgggggatgtttttggtgtatggttgaaccctttgaagagcagccgggcattttgaatgtagtgtccggctacactggcggccatgtcgccaaccccacctatgaacaggtttcgtctcacaccactggacatactgaagctgtagaaatcaccttcgatgccgacaccattagctatccgaagttgttggacatctattggcagcaaaccgatccgacagatgctatgggtcagtttcaggatcgcggcgataattatcgaccggtgatttttgtgaaggatgatgcccaacgcgaagctgcagaggcttcaaaaacggccttagctgctagtgggcgcttcagtgatccgattgtgacgcaaatcgaagctgccaagccgttttatccggctgagcctgagcaccaacagttttatgctaagaatccccgccgttatgcattagaacatgcgcaacggcaggcttttatcgacaaaacatggaaggatcaataatgcatcggactttttacgaatatctcatgaccctgcgtaaccccaatgaccatagtgaaatcgctgaatttgcgaaaaatgcctttttggatcaaagctttcctaagcaagaaaaggattaccatcgactaagcgattatctggaactaaacggcaattatttgccaagcatggccgtttttgacgaaacgtatcgcgcctatgaggcgagtgaaagcacaggaggcgattcgtatcaataaacgtagattaccgtggtgggccgttttgataattgtcatcgtcgcacttggcggtggtgtcgcaggcggttacgcgctctcttatcagcaagctcaacaaagtgttttgaaaacaagtgtccccaaggaactagcacccgttattgctgcttatgagacagttaccaataactactataaaagcgtcaatacgaccaaattaaccgatggcgcgattaaaggtatgctggcaacgttagatgatccatattccgtttacttgcagaataacgataaaaccaatcttgatgacacgatttcggcttcatttggcggtatcggtgccaccatccagcaaaatcatgacagtctttccatcgccagcattttacctgatacgcccgccaaaaaagcaggcatgcaagtcggcgatgtgctgctcaaggtcaacggtaaagatgtctccaagcaaaccgttagcaaggcagttgccaaaattcgcggtaaaatcggtaccacagtggccgtcaccgttaagcgcggcagcaaacaagcgaccttctcgatgaagcggcagaaaatcacggttgacactgtcactggccaacttgcttcggccaacaaacaggtcggcgtcattactatctcgacttttagcgaaccaaccgtcaaacaattcaaggccactgttaagaaattacgcaaagaaggggccaaatcctttgtcctcgacttacggcaaaatccaggcggcatgatgagtgcggctttgtccatcagctccatgttctctaaaaacggccaaactgttctgcaagtcgaagaccgcaacggtgccaaggaagtctataaggctggcaagaaactcgatgacggctttaaagtcactgaaaaaacggcggtcttaattgatggtaattcggcctcagccagtgaaatcaccgctgcagcacttcaccaaaacagcaacattccgcttgtcggtgaaaagagtttcggcaaaggcactgtccaaaatgtcggcgaaatgggcagcaacaaagaactcaagctgaccatcgctaaatggttaacgccaaatggcacttggattaaccacaaaggtctaacacccgatatcaaggtcgactacccagccgcggcgaagatcaccttgatcaacgccactcagctcaaaccaggcgataaaggcagcgatgtgaagtccttgcaacaaatgctcacggcacttaaagtcggctccgtcactgtcaatagtcaatacgacgatgccacccaagccgctgtcaaaacgttccagcaagcaaataagcttgacgcaacaggaacagcggatcaggatacgttggcaacgctcgcacagaagttgagtgcacagttgaccaaggatgatccgatgatgaaggcggctgtggatgcagtagccaagtgaaaatcaaataggttatgatatgcgcgtatatgccttttaggaggtgtgtacgcgtttttttcgcacgttcaatgatccgcattttcgtgttgtcatggttgactgggaaaattatgccagtgcgcttaccgcaaagtttcgccaattatatagtcgaacgccggattcaaaggccttatttgaagtttattccgcgttgaaggatgatcccgtctttaagcaaacgtgggatcagctaaaggtcgaagagttaggagaagaacgattgctgctcagcgtgcctaatgccggagagctctatttcgttgagacttttcttaagtttttggggaatgatgattttatcggcgtgcaactgcctggggatgaaggaactcgcaagaggtttggtgagatggttagcgactaaaaagtgcatgactgagcggcccgacacatttttcggctatcatagtttaaaaacaggcagttgttacttttcacataaatacagtatgctagtcgttaggaaatagttcatactgagattttaattgtcttagtactaaaggagttacaaaaatggcacaaattcaatggtttcccggtcacatggccaaagcccggaaacaagttcaagaaaagattaaacaagtcgatctcgtgctcgaagttgtcgatgcccggacgccggaatcgtcgcgcaatccaatgttggatgagctggtggctgataagccgcgcattatggtgctgaataagcaggatctggctgatccggcgttgacggcggcatgggttcaatattatcaggatcaagggtttgcggcgattgcgattgatgcccagcatgccaagcgattgcagcaaattccgcaattggcgacgaagttgatggcggaaaagattgcccggaaaaaggcgcgcggcattcgtaatccgatgattaaggcgatgtgtattggcatccccaatgtcggcaagtcgacggtgttaaatcgtctggttcggcgtaacatcgcggtgaccggcaacaaaccaggcgtgacgaagaatcaacagtggttgaaggccagtgataactttcaattgcttgatacccctgggattctttggccgaagtttgcctcacaagcaattgggatgcggttggcctttacaggtgcaattgccgatgcagttttccaagaagacatggttggcttgtatgggttgacttactttatggcgcattatccagctgctttgaaaaaggcataccatgtcaccgatgatgatttaaatgaagcgccccatgatctgctggttaagttgacgaaatcacaaggtttcgctgaggcttacgatcggatggctgagcgcttgatttttgatgcacgacaaggaaaattgggacgctttaccctcgagaagcctggtgagacagatgccgacgctgagtgagtataaagcgttgctggctgctgacgaagttgcaccggctattttggcggcacttaaagaagacagtcgcatcggtgctggcaaattactggcagcgtatcaacggcgacaggcccatcaagcagccgaagaggtggctttacgttatcgtagcaggtatgagcgtcagttatggggaacctatgagtatgtcgctgggttagacgaagtagggcggggaccacttgctggccctgtcgtgacggcggcggtgattttgccgcaccattttcagtggccggtgaatgactcgaaacagctgaccgcacatgaacgcaatgtgctttacccgcatattttaactgaagcgattgcagttggcattggcgtggctgataatcggacgattgaccgtgaaaatatttaccatgcgactgaattggcgatggctcaagccgttgaccatttgcgagtcgctccggaatgtttgttggtggacgcaatgcacgtgccagtcgacttaccgcaaaaacgcttaattaagggcgatgccaacagcatcagtatcgctgcggccagtattgttgctaaagtgattcgtgatcggcttatgatgatgtacgataaaatttatcctggttatgattttaaggacaacatgggatacgggacaaaggcacatcttgccggattggcggcgcacggcgttaccccaattcatcgccgcagttttgggcctgtccgtgatcgactgcgctcttagtgcttcattgagtgtgtcgatgtcgtgtttgcgtagtttatttgcgggaggacgaccaacaatgacactgcgcaattttttactagcatggcacattgccacacgccagaatccgcggatggcggttgctttagaacaagctatccgaggaaaagatgatctcgcaccgtttcaggcagaactcaagaaacgtttgactgaccagtatagtcaacaattaattgctaccaaacacgtgccgtttatgacgtatgttgatgctgcttatccaccacgattgcgggaaattccgcagccgccgttggtgcttttttatcgtgggcagtcaggtctgttgaatcaattaacgttagggattgttggttcgcggcgtgcaaccggctattcagcaacggcgctggcgcagttattgccgcaactaccgtcaatggtgattgcaagtggactagcagcaggcgctgatgcgatggcgcatgaggcagccctcagtgcccgactgccaacgattgcagtgattgccaacggccttgatcaggtgtatcctgccaagaaccgcgatttgcaggtgcagattgcgcatgttgggcttgttttaagtgagtatccaccagcaaccggcccgcagcgttttcaatttgtcgctcgcaatcggattattgccggtattgcccatggtgtgatggtaactgaggcggagatgaaaagcggcagtctcatcacggctaactatgctttgcaacataatcgcgaagtttttgcgttgcctaatcgaattgatgcgcctttgggagcaggtacaaatgcgctgattcaggcaggagcggcgttggtgactggtccagagacgttggtagaaaacttgaatttttacccttgaggtgcacatttttgcttactttatagtagaaaaaatttcttttgatttgacaagagcaaaatgactagcttatgatagcaactgttttgagtcagcaggtggcattgaccattagactggcaccagttgcgattgctttgatggtcgcgccggtggcagatgatccattgccgccttaggacgcatcaattactgacgacgaatcgtcagcatcgcacaaattaatcagggcttgcctactaggcaatgccaccggaaggagcgcgttcatggccgacaagaagttagtcattgttgaatcgccagccaaagccaagactattgaaaagtatcttggccgaacctataaagttgttgcaagtttggggcacattcgcgatctacctaagagtcagatgggggtcgatgtcgataacgactacgagccaaagtacatttcgattcgcggcaaaggcgatgtgattaagtcccttaaaaaagatgctaaaaaagctagcaagatttatctcgcagccgatccggatcgtgaaggagaagccattgcatggcatgtcagtcacattttaggtttggatccaaaagccaaaaatcgcgtcgtttttaacgaaattacgaaagatgccgttaaaaatgcgttcaaaacccctcgtggcattgatatggatcttgtagatgcccagcaggcacggcggattttggatcgactggtaggctattccatcagtcctttattatggaagaaagttaaaaagggcctgagtgctggccgcgttcaaagtgttgcgctaaagctgattattgatcgcgaaaatgaaatcaaaaacttcacgccagaagaatactggtcattagatgctgagttccaaaagggccgtagtaaaaagttcagtgctagtttctatggcctgaagaataaaaagcaggctttaaagaacaacgaggccgttcaaaagattttgggtcaagtggacaaaactaagccgtttgctgtgacgaatgttgttaaaaaggaacgcaaacgcttcccatccccgccgttcacaaccagtaccttgcagcaggaagctaaccgtaagttgggattccgcacccgaaagaccatgatgttggcccagcaactgtatgaaggaattaacttaggtggtaagttaggcaccgttgggctgatcacgtacatgcgtaccgactcgactcgcgtgtcaaatgttgccaaaactgaaaccagccattacctgcatgagaaatacggcgaagcttatgctgctgtcaaaattcgccaaggtaaactgcaggaaggggcacaagatgcccacgaagccattcggccaaccagcacattacggacaccggatagtttgacggcagttttggacaaggatcagatgaaactttatcggctgatctggagtcggtttgttgccagtgaaatgaccccggcgattattgacactgtggccgtgacgttagaccaaaacggtgtgactttccgcgccaacggtagtcagactaagtttgaagggtttaccaagttgtatgtctcatcacgtgacagcgatcaaaaggacaatattttgccaccgcttgcagttggtgatgatgtcaaaatgttgaagaccgatccggctcaacactttacacagccaccagcccgttactcggaagcaaaccttgtcaaagcgcttgaagaaaatggcgttggtcgtccgtcaacttatgcgccaactatcgaaaccattcagaaacgttactacgtgaaactgaatgctcgtcggtttgaaccgactgaattaggtgagatcgtcaacagcttgatcgttgaattcttcccggacatcgtgaatgtcaagtttacggcgaacgtcgaatctgaacttgataggattgaaaccggcgaggctgattgggttaaggtgattgatcagttctataagccatttgaaaaagaagtggctcacgccgaaactgggatcgcgaagattcaaatcaaagacgaaccagccggcttcaactgtgacatctgcggtgcgccaatggttatcaaaatgggtcgctatggtaagttttacgcctgttcccgattcccgaattgccgcaacaccaaggccattgtcaaagagatcggggttgtctgcccgaaatgtcatatcggtcaagttgttgaacgtaagagcaagcgtaaccgcgttttttatggttgctcgcgttatccagactgcgactttgtctcatgggacaaaccagtcggccgcgattgcccggtctgcggacatttcttagttgagaaaaagagcaaagctggcacccaagttgtctgcccaaataacgattataaagaagccttacaaaaagcataatttgagaaagcagtgagtatgttatctttgtactcactgtttttttcgggtaaacttgggcagagcgcgaacaggcgcgcttagaaaccggagcctaaatggctgggctttggccatttaggcttgaggtccttatgtgcaggtttctgcgcctgtttgcgcgtttcggaaccggagcatcaccagccttaaagtctaaatggctgaactttggccatttagacttcaaggtccttacacgaaggtttctgcgcctgatcgcgcctttagaaagcttgctcaaagattcagtctgcccacaatagcaagctgagtcgctaccgcatcagcaagccaccaaaatacacgtgccgcaaaactcacattttctctgaacgaactaattgcgccacgccaccacaaggaggaatcactcatgccaacagttaatgtcattggtgccggactagccggatcagaagcagcctggcaaatcgctcaggccggggtagatgtcaacttatacgagatgcgtcccgttaaaatgacgcctgctcatcacacgagcaattttgctgagcttgtctgcacgaattcactgcgcgccaaccagatcaccaatgcggtgggtctattaaaggaagaaatgcgtcagttacattcaatcattattcaaagtgctgacgccaccgctgtccctgctggcggtgccttggcggtggatcgcgaaccatttagcgagctagtgacccaaaagttgacgagcaattcgcatattcatgtggtgaatgaggaattgtcagcatttcctgatgggatcacagtggtggctaccggtccgctaacagcgcccgggttagcacaggcaattgttgatctgaacggcgaggccggtttgtcattctttgacgcagccgcaccgattcttgatgcgaatacgatcaacgaggacattgtttataaaaagtcgcgctatgatcgtggcgaagccgcctatttgaattgtccgatgacgaaggatgaattcttggcgttctatcaagcgctcgtttctgccgaagttgctgaaggccatgattttgaaaagatgacggtttttgaaggctgcatgccgattgaagtcatggccaaacgcggtattaaaactatgttgtttggcccgctaaagccagttggccttgaagatccacggacaggtaaggaaccttacgcggttgtccagttgcgtcaagataacgctgcagcgagtttatataacatggtcgggttccaaactcatcttaaatggggcgagcaaaaacgggttttccgactaatccctggacttgaaaacgtgcaaatcgtccggtatggcgtcatgcatcgcaacactttcatgaaatccccagtggttttggaaccaacatatgcatccaaacgccggcctgatctgttctttgcaggccagatgactggggtggaaggttatgttgaaagcgccgccagcggtctgattgcgggtatcaatgcgacccgtatggcgcttggagaaaccccgctgatttttcccgaaactacagcgatggggtcaatggcgcattacattactcacacatccgcccatcacttccagccgatgaatgcgaactttggcatcatgccagcgttaacagtcaaaatacgcaataaaaaagaacgcaatcagcagttagctgatcgtgcattaaaagatttagctactttccaagcaggtatgaatcgggttgaacaagtttaaggacgcaaaaaatctcgggttaccgggattttttcattggtatttcggcggcttgatggtgttgatgcactgaaagcgtcaacaatggctgcattttatgttaatgtattatcggagggattcaatgaagccaattgcagcgtttcaagagtatcttgaagttgaacggcagtattcaccggaaacagtgacggcttatttgagtgatcttcaagaatttcaggcgtttctcaaggccaacggcgggtttactgactttcggcatgtggatgatttagacgttcaaacttatttgactgatcttaacaaacaggatttggcacggacatcgattgcccgaaaaatcagtagtttgcgaagcttttaccgttatttgacacgaattgatgtcgtcaaacgcaacccatttgagctggttgaattaaaaaagcagcatcatcatttaccacaatttttctatgaagccgagattcaggaactgtttaagacagttgctggcaaaaccccgctggatcaacgtaatcgcgctttgttggaagttttgtatggcaccggtattcgagtttccgagtgtgccaaactgacattgaatcaggtcgatttcaatacggcattactgttgattcatggtaaaggcaacaaagataggtatgtgccctttggacagtacgctcagcaagtactacgaacttatttaaaagatggccgacaagtcttgatggctaaaagtcaggcacagcatcgatatgtattcgtgaaccagtatgggcgtccgattacctcgcgtggcattgaatatattttggatcagctcatcaagcagacgacgctgacagctaacattcatccccacatgctgcggcatagttttgcaacccatatgctggatcatggtgctgacctgcgaactgttcaagagctactgggtcatgcaagtttatcaaccacacaaatctacacgcatgtcaccatggcacatttaaaaaatgagtatatgaaatattatccgaagcataattaagactaaagcatgatgcaaaagcagtctgagttttttaagctaagaacattggcgataacagattaatcgctactttagctgtttttatccgacgagatacgcagataacgcgctcgcagtcgcagaaacctacacataatgacctgcaagcctaaatagccaaaattcagccatttaggcttgcagcccacttatgctccggtttctaagcgcttctgctcgcgctcacttaaaaaggagcatgactatgacaacaattgcagcagtaagaaaagatggtgtgaccgctttggccggtgacggtcaggtaacccttggcgaaaaggtcatcatgaaaggcaacgcgcagaaagttcgccggatctatcatgatcaagtcgtcatcggatttgccggcggggtggcagatgctttcaccctgcaagactggtttgaaaagaagctggagcattatgctggcaacttgcgacgttccgcagttgcgctggctcaagattggcgcaaggatccgaccttgcagaaacttgaagccatgatgatcgtgatggatgagcatgacctgttacttgtatccgggtctggcgaagtgatagatccagatgaagacgtggtagcgatcggctccggcggcaactttgcgcaagccgcggcaatcgcgatgctgcggcatgccccagatatgacaccagctgacattgccaaagaagcagtgaatatcgcagggaatatcgatattttcacaaaccacaatgttattgtcgaaagcttttagtttgtaaccgtcggcaattacattgacctacaggaggcttatgatggcagaagtacaaaccccaaaacagatcgttgaaaaactcgatcaatatgtcattggacaagatgatgcaaaacgggccgtcgcggttgccttgtataaccgttatcggcgaatgcaattatcgccaaaaatgcaagaagagattaccccgaaaaacttactgatgatcggaccaaccggtgtcgggaaaaccgaaattgcacgacgactggcgaaaatagttgaggcgccatttgtgaaggtggaagcgactaagtttacggaagttggctacgttggccgtgatgtcgaatccatggtccgagatcttgccgaaactgccgttgccatggaagaagagaagcaattttcaaaggttcgcatacgtgccgaaaaagaagccaacaagcgtttggttaaaattttagtgccggccattcgtaaggaaaagaataccaatccgatggccgagatgatgagcatgttgcaagggatgcaaaatggcaaaatgccagctggcgatgatgcagatgcaggcggcgaagtgaccgatgatattcgcaataagcgtttgagcgtggcagagcaactggaaaaaggattacttgaagatcatgaaatcaccgttgctgtcaatgatgagaaaaaaggcggtggcatgggtgacatgtacggtcagatgggcattgatctaagcgacactattggcgctttaatgcctaagaaaaaggttgagcggaccatgaccgtcaaagaagctcgcgaaatcttcatcaaagaggaatctgacaaactggtcaatcatgccgacatttatcacgacgccattcaaagtgccgagaataacgggatcattttcatcgatgaaatcgataaaattgctgcaggaaacaagcataatagcggcgaagtttcgcgtgaaggtgtgcagcgagatattttaccgattgtagaaggatcgcagattaacactaagtatggtcctatcaatacggatcacatcttgttcattggctcgggtgcgtttgccgaggctaagcctagtgatttgattgctgaacttcaagggcgttttccaattcgggttgaattgaaggacttaaccgaaaaagactttgtgcggatcttgaccgagccagacaatgctttgatcaagcagtatatcgccttgattggtgcagatggcgtgaagattaccttcacgaaggaagcggttgatcgaattgcagagattgcgactcaggtcaaccacgacactgataatattggagcgcggcgactggcaaccattcttgaaaaactgcttgaagacgtactttatgaaggtccagatatggcgatgggcagtgtgaccgtcacccagcaatatgtggatgacaagattggccatattgcggctgattcaaacatgacgcggtatattttgtagttaacaataatgttgtaggtaaaggatgaggatgtatggtaacgattgcaaatgactttttgacagttaaaatcagtcggcatggtgctgaactgaccagtatcaaagataacctgacaggcagggagcgtctgtggcaagcagatcctgcggtgtggggtcgccacgccccggtcttgttcccgattgttggggcgctggctgacaatcaatatcattacgcaggcaagacttaccacatgggccagcacggttttgcccgtgatcgtgatttcacggtgctctctgcgacaccgtttaaagcgagcttcgttctgaaggatgatgacaaaacgcgggcgatgtacccgttcgcttttcgtttaatcatcacgtttgcactagaaaataacaatctacatgtcacgtatcacgttgacaatccggacaaaagtgagccactgttctttagcatcggcggccatccgggcttcaaggtcccaatgacgccggatactcaattctccgattattatttgaacttcaaaccgcgtaagtcgcttgttcagattccattggttgctggtgaaggcattgattacacgcaccggaccttggctgcaactgatgccaatttggccttaacgcacgaaacatttgatcatgatgctttaattttcgcgttgcttggtaagacaaccttcaacttggtttctgacaagacgaaacatggtgtcagcgttaccatgaccgataccccatatctgggcgtttggagtccgtatccaaccactggcgactttgtctgcatcgaaccttggtggggcatcgccgacacgattggcagcactggcgacctgacgcgcaaactcgggatcaatcgacttgaacctggcacggcatttgagaagggttacatgatcagcattttctaaggtgtcatcagtttgtcgattaggtacatgaaaaaaagacatccagtttcggatgtctttttggttgccatcaaaaggtgactaagagcggccccggtgttgacgaagatattggcctaagccaaagggcaccatattttcatctccggccttgatgcgtttgaagtttgcccgatgtttgatcaaaaagacaaccagcaacccgcaggcaacagttgtcagcaaccaatcatggtaaacaagcgaccaagctgtgatcaacaccatacccagtgtgctggcaacgctgaccatggacgttagcaagatcaaactgaaccagatggcaaatgcaatgacaaaaaatggcggattatatgcaagtaaaatgccagcgctagttgccaccgccttaccgcctttaaagcgaatgtagatcgaaaatgtatgaccgaatacggccgctaaacccacgatcagcaccagccaatgatgctcgatgccaaagagaatgggtaagctggcagccaacgtgccttttaagatatccagcaccaagacaattgagccgccgactggccctaacatgcgataggcatttgtggtgccaatattgtgactcccgcctttgcggatatccgtgtgataaaagagtttaccaatgaccacaccaaacgggatggcgcctatgaaatacgcgagtataaaacaaagcacaagtatcaaatgtgcccctcctctcaaactagaaactattttagcatttttgacttttgagtgatacgtcagtagaataaaacgaacgtacattcgaataaaacctgtgaagcgggttgtggcgcgatttggtgttgtcttgcgcaaggatcatggcggggcacagcgtagatatggtgccagcgggcgatgaatttcacgtcaagaagtcatagttatgtgccatgcttagggaagtgcggttttctgctgagctttgggacattgacacggctaataaaatttaaatgaacaatgatggtattagccagctgggtcgattttgaggagaaaacaggagtcctgagagcaatacgttgaggtctgctgttgatggtgttgatgcctaaacgcactcgcagcaacctgcgtgtaaggaccttgggtgcaatggtcaaagtccaaccatcgcacccaaggccgcttatgctccggtttctaatcgggctgctctattgaaacgcgctcgcagtcgcagcaacctgcgtgtaagggacttggccgcaatggtcaaagccgaccatcacgtccaaggccgcttacactctggttgctaaccgctcctgctcgcgctctactgaaacgcgctcgccagcccagaaacctgcacataaggaccttgggcacaatggtcaaagcccaaccatcgcacccaaggccgcttatgctccggtttctaatcgggctggctcgcgctcttattttttatttctgaaatctcaacgcgtggtgtattctataacttagttgttcaaaaaagggagtttactatggataaagcaacgcaagcatataatgattcatccattcaggtgctgcatggcttggaagctgtgcggaagcgtccggggatgtatattggttccaccgatggccgcggtttgcatcacttggtctatgaaatcgtggacaactctgtcgatgaagcgctcgcggggtttggggatgagatcaatgtgacgattcacgccgataactctgtgaccgtacaggatcatggtcgagggatgccaacggggatgcacccgagtggtaaaccgacgattgaagtcattttaaccgtgctacatgccggcggaaaatttaaccaaaatagttacaaaacttctggtggtttgcatggggttggctcaagcgtcgtcaatgccctatcggagtcattgactgtgcgagttgtgcgggataaacacgcatttgaggagcattttatcaatggcggtcatcctgatggcagtttgcagaagttgggcaaagttaatgaacctaatggcacgaccatcacattcaagccggacccgactatttttcaaaccaccgttttcagttatgataccttggccgaacgcttgcgcgaatcagcctttctactgaaaaatattacgattaatctgacggatgaacgcaccggtaagcacgacagttatcactatcctgatggcttggtcagttttgttaaataccttaatgaaggcaaagacgcattgtcacaggtgatcaattttgaaggcaaaaaggacggtatcgtggttgattttgccggccaatataacgatggctattctgaaaacctgatttcgtttgttaataacgttcgcactggtgatggcgggacgcatgaaattggcttgcgcagcggcatgacgcgagcattcaatgaatttgcccgaaaagtcggcttgctgagggaacgcgacaagaaccttgaaggcagtgatgtgcgtgaaggttttgcaggtattttaagtgtccgcattccagaagaaattttgcaatttgagggccagacaaagggcaagctaggtacgccgcaagcccgcactgtggtcgatgggattgtctatgacaagctgtcaacttttttgatggaaaacggtgaagagtcgcaagagttggttcgtaaagccgtcaaagcccgtgatgcgcgggaagcggctcgaaaagcgcgcgacgatagccggacgggacgcaagcgcaagaaggaccaaggtttgctttccggtaaattgaccccggcgcaaaccaagaaccctaagcgtaacgaattgtatctcgtcgaaggggattctgccggtggttcagctaaacaaggccgagaccgaaagtttcaggcgatcttgccattgcgagggaaagtactgaatacccagaaggccaagttacaggacatcgttaaaaacgaagaaatcaatacgatgatttacaccatcggcgctggtgtcggtgcggattttgatctgcagcaggccaactacgacaaaatcattattatgactgatgcggatactgatggcgcgcatattcagattttgctactaaccttcttttatcgctacatgcggccgctgattgacgcaggccgaatttacattgctttgccaccattgtatcggctgcaaaaaggcgctggtgctaaaaccaagatcagttatgcttggaccgatgaagagttggccaaagagaccaaggccatgggcaagggttacacattgacccgatttaaaggacttggggaaatgaatgccgaccagctttgggaaacgactatgaatcctgagacgcggactttgatccgggttcggattgacgatgctcagctggcggaacgacgcgtgaccactttgatgggtgatcgcgttgagccgcgtcgtgaatggattgagcataacgtcaagtttgatatggatgacgacggcagtattttggaaaccccgactgctaatcacgaaaaattacagtttggtgccaagcaaatcgtcaaacaactggacaagaaaggaaagtaaaagccattggccaatcagattcaagaactgaccttagaagaggtcatgggcgaccggtttggccggtactcgaaatacattattcaagaacgggcgctgcctgatgtgcgtgacggcctcaaaccggttcagcgtcgcattttatttgcgatgaaccaagatggcaatacgtatgataagggcttccgcaagtcggctaaaagtgtcgggaatgtcatgggtaattatcatccccacggcgacagctccatttatgaagcgatggttcggctaagccaggattggaagttacgggccccactgattcagatgcacgggaataacggttccatggatggtgatccgccagctgcaatgcgatacacggaagcgcgtttaagcaaaatcagcaaggaaatgctggccgacatcgataaggaaaccgtcgatatggtgttgaactttgatgacacggcacaggaaccgactgtgctgccagctgggtttccaaatttgctggtgaacggtgccaccggtatttctgccggttatgcaaccgaaattccgccgcacaatctgcgggaagttattgctgccgtcttatacttgctgaagcatcccactgctgatttagatactttaatgcaatacgtcaagggtcccgattttccaacaggtgggattattcaagggcttgatggcatcaagcaagcttacgaaaccggccgcggtaaaatcgtggttcgttctcggacacacatcgaaaccattcgtggcggtcgtgagaagatcgtggtcactgagatcccgtatgatgtcaataaagcgcagatgattaaaaaaatcgatgaattacgcatcaacaaaaaagtggacggtatcgccgaagtccgtgacgaaagcgaccgttttgggcttagcgttgtcatcgaattaaaaaaagaagccgatgcacatggcatcttaaactatttatttaaaaataccgatctacaaattgcatacaactttaacatggtcgctattgccgacatgcagccgaagttgctaggacttaaggccatgttggaagcatacgtcgaacatcgacgcgatgtggtcactcggcgaacgcgttttgacctcaacaaggccgctgctcgacagcacattgtcgaaggcttgatcaaaatgctatcgattttggatcaggtcatcgccgcgattcgtgcttccaaggataaaggggatgctaagcgtaacttagtcaagaagtttgatttttcggaagctcaggcggaagcgattgtttccttgcagctgtatcgattgaccaataccgatatcacggctttacagaaagaagcagcacaattggcgaaagcaatcgccgagtatcaagatattttggcccgccccgctgcccgcgatcgggtgattgaaggcgagttgaagcggattgccaaggagtacggggatgatcgtcgcagcagcattcaagccaaaattgaaacacttgaagtggcgacaacggtgacggtggctgatgaaaccgtcatggtgcaggtttctcgtgatgggtacgttaaacgcagttcactgcgcagttatcaggcggttgatccggccgacaatggtttgaaggccaatgatcttgccattttcactggcgaactgagtacgttgcagcatctttacatcgtgacaaatgccggaaatgtcatttatcgaccagtgcatgaaattagtgatgcgcgttggaaagacaccggcgaacacttaagccaaacagttggccttggcactgacgaaaaagtcttggcagtgtttgcttttgatcaactcgatggcgctggcagttttgtgttagggtcaagtgacgggtacatcaaacaaactgccttaagtgatttgcagccgcaacggacgtacaagagtaagccgatgatggcgatgaagctgaaagacccagccgcgattgtcaccaatgcatacttcacgactgatcagcaacaggatgtctttgtggtcagccgccacgcttacggactgacattcccgttaagcgatgtgtcaactgtcggtgcccgggcaaccggcgttaaaagtatggatctaaagccagacgatgaggttgtcaatttcattctagtgaaggatccaactacggctaaggtcggtattttgacccaacgtggcgccttcaaaaagatggccttaagcgaagtcggggaaatgagtcgtgcccgtcgtggtttactggtcttgcgtgagcttaagcgtgatccgcatcggattgtcgcgatgatgtcagtcgatgacgctacccgcctgaatgttttgaccgatacgggtaaggtaacgacccttaatccggcacaacatccagcaggtgaccgctattcgaatggttcgtttgtcattgacactgatgtccttggcaagccagtttttgttcaaaccaaagaagaaccagcagatcaagtcgaataaatggtgatcattgacaccgccgtctgtactaatacagatggtggcgtttttgattattataggacagaccagttgtgcacaatttaacaaaatgccgaaatcatgggcgaaaagaagcgacgaagcacacttaaaaaacaatataacgcctattatatgggcaataaaacgcttgcatagatttggcggcgtgttatactgtgtttgtaagaactgtcacatctgtaatccactttaggaggcaaacaactatgaaacagcttgacgaaaccaaagttcctaattattgggaaggctttaacggcggcgactggcaagaagaaattaatgtgcgcgattttatcgagcataacctgaaccaatatgacggggacgaaagtttccttgctggccccactgaagcgacaacagtcctgaacaatcaggttctaaatttaaagaagcaagaacgtgcaaatggcggtgttttggatgctgacaacaatattccatctacgatcacctcacacggccctggttatttgaacaaagatcttgaaaagattgttggtgttcagaccgacaagccattcaaacgagcattcatgccatttggcggtattcgaatggctgaagatgcattggaatcttatggcttcaagacagatcctcaagaacacaagattttcaatgaatatcgtaagacccataaccaaggtgtctttgatgcttatacccctgatatgcgaaaggctcgccattacaagatcgtgactggcttgccagacgcatacggccgcggccggattgtttctgatttcccacggatcgctgtttacgggatcgatcgtttaatggctgagaagttcaaggattataacttgacgggcgacggcgaaatgactgacgatgtaatcaaattgcgtgaagaaatcaatgaacaatatcgtgccttaaacgacatgaagaagatggccaaggaatatggctatgacatctcgcgtccggcagctaatgcgcaagaagctgttcagtggatctactttggctatctggctgctgttaagactcaaaacggtgccgcaatgtccgttggccggatcgatacggttattgatgcttatatccaacgcgatatgcgcttaggcaaattgaacgaagaacaggcacaggaactgattgatcatttggttatgaaattgcggatggttcgtttcatccggactgaagaatataactcactgttctcaggcgatccaatctgggcaaccttgtcattggcaggaatgggcaatgatggccgtcaccacgttaccaagacggctttccgtttcctgaagactttggacaacatgggcgcagcaccagaaccaaacatcaccttgctttggagcgaacgcttgccagaaggctttaaacgctatgcaaccgaagtatccatccaaagttcaaccattcaatatgaaaatgatgacctgatgcgcaatgaatggggtaccgattactacggtattgcttgctgtgtctcggcacaaccaattgctgatggcgttcaatactttggtgcccgtgctaacttagctaagacggttctgtatgcgatcaacggtggtaaagatgaaattcaggaagcgcaagtagggcctgaatatgcaccgatcaccagcgattacattgattacaaagaattcatgaataagttcgacaagatgatggactggctggccgacacgtatgtcaatgctttgaatgtgattcactatatgcatgacaagtattattatgaagctgcacagctggcattgaaggatacccaactgaaccggaccttcgcaaccgggatttccggcctgtcacacgcggttgattccatcagtgcaatcaagtatggtcatgtcaaggcaattcgcgatgaaaatggtgttgcagttgacttcgttgctgacaatgatgactatccacgttatggtaacaacgatgatcgcgctgatgacatcgctaagtggttggttaagaccttctataacaagatgaacacgcatcatctgtatcgcggcgcgaagttgagtaccagtgtcctgaccattacttccaacgtggtttatggtaagaatacagggacaacaccaaacggtcgtcaaaaaggcgaaccattctcaccaggtgccaacccggcatacggcgcagaaaagaacggcgcattggcatccttgatgtccaccgccaagattccgtatcattacgcaactgacggcattagtaatacgtttggggttactccgaacacactgggccacgatgatgaaactcgtaaggataccttggttcacatggttgacggctatatggaaaacagcggcatgcatttgaacatcaacgtcttcaacaaggagaccctgattgatgctcagaagcacccagaagaatacccaacattgaccgttcgggtttctggctactgcgtctacttcgcagatttgaccaaggaacaacaagacgatgtcattgctcggaccttcttcgaagaaatgtaagcagcttaactcaagacaggaagccattcctgttttgccaaaagacggcaacgatgctgttgccgttttttggcagaatgaaatgaaaatcaattgaaaacgacacatgatgttgtagtggaggcaataagatgaaactcatcgatcagtcacaaagcccattaaatatcttagaacaagttggtcaggatcatgatggcccgatcaaagggtatgttcactcggtcgaaagttttggttcggtcgatggccctggtattcgcttcgttgtctttatgcaagggtgtcgcatgcgttgccagtattgtcacaaccctgacacctggaacattggggttggtgaagaaatgacggccgatcaaattttggcggatgcccagcgctataaagcattctggggtgaccaagggggtattacgtgcagtggcggtgagagtttggtacaaatcgatttcattctcgaactcttcaccaaggctaaggcactgggaatttcgacttgcctcgatacgtcaggcggccccttcacgcgtgaccaaccgtggtttggccagtttgaaaagctgatggctgttactgacatctcattagttgatattaaacacatcgattcggccgagcataaaaagctcaccggttttcctaatgaaaatattttagatatggtgcagtatatgtcggcgcatggtgatgacatgtggattcgccacgttctggtcccggaacgcactgactttgacccttatctcaaacgattaggggactatattgcgacattggacaaaaacgtggtccaaaaagttgagattctgccgtatcacacgttaggcgttaaaaagtatcacgagcttggcattacgtacccgcttgaaggcatcgaaccgccgtctgccgatcgcgttaagaatgcagagaatctgctgcacgttaaggattataccggatggcaaagctggcgtccgaaaccagttgcgagcaactgaatttttagctagaacttaacgtaacgattaaaaacgcggcaaattcgttgcgttttttttcattgccacttatgatgatggttgaacgatattattaaataataaacgaaagggaagccgccctatgaaaacgaaacaagagcgcattttttcctcaaagacactaacttattttctgcaattggcagaaaccatgaactacacccaagccgcccaattgcttggcattacccagccagccttaacacagcagatcaagaaattggaacggacagtgggggcaccgctgttttattctgtcgggaagaaactgcatttatctgacgctggtcagaccatgttaaagtcaacccatgagatctacgagatcttgaaccagacaaccgacgaaattcaacaaacaaccagtgcaaccgtcggaaaaatcaatattgggttattaagctcaatcgaggatagcgcctttattgcgttcattgctcattactatcaactgaatcctgaagttgaagtaacgctacggatgatgacccgtcacgaaatttgggaatcattggaaaacaaccagattgatttggctatcatgaatctgccagatgaaaccattaagaactggaaaccatacgccagcaagaaaattattgatgaacaattgctgttcttgcaccacgatgacgccttggctaaccgtaagcgaatccatttcaaagatactttagctgaaccttgggcaacttatcctgacgactatttccttggacagcttctgcgtgaggcgtacaagaatcaaatggttgattttccgcacgtggtcgcacatttcaccacgccatatcagttaacccaattcgttaacttgtcaggggtcaacacggccttaccaaccagttttgttcgggcacgcgctgatcaaatcaaggcctatgctattgcgtttgatccggccattcgctttgagatttcttttgtttatcgcaaagagaaagctgacattccgcggatctcgaacttcttccagacctttgacgattatctgaaggaaaaagattacttgtcgcgggtcagtgaaaaccgtgttaaacttgataagtaaattattcagttgaggagcgatcagataagatgacgactttgatttttgggcatcagaacccggacaccgacgcgattacgagtgccatgagctgggcagaatttcagaaacaggcaggcaacacggatgttgaggcggtagcattaggcgaaccgaacgatgaaactaagttcgtccttgatcacttcaaggttcaggcaccgcgagttatcaagacggcagccaacgagacggatcatgtcatgttggttgatcacaacgaatttcaacaaagtgtcagtgatatcgaagacgtgacgattgattctgttgtcgaccatcatcgcatcgctaacttccacacggcagcgccgctgttttaccgagcagaaccggttggcagcaccaataccgtcatttttgagatgttccaggaatatggcttcaagatttcgccaacattggctggtttgatggcttctggtttgatttcagacacgctgttgttgaagtcgccgaccgcaaccgataaggataagaagattttgccagaaatggcgaagattgccggaattgatttgcagtcatatggtcttgccatgctgaaggcaggcactaatttggccgccaagtcagatatggacattatcgaaggcgatgctaagagtttcaccatgggcggcaagtctattcgcatcggacaggtcaataccgtcgatctgaacgacatttacgcacgtcaggacgaattgatcaatgccatgaccaaagaggcgcaggcgaaaggctacgacgatttcctgctgattgctactgacatcttggacagcaattcaactggtttcgcagtcggtgctgaccgcgataaaatcgccagtgcttttaacgaacagttcgacaaggacgcgcgtttggcattgcctggggttgtttcccgcaaaaagcaggtcgttccgccaatgcagagcacgtttgaaggttaactttcatctttaattgcacacaattgttctaaggaaagtcgcagctagccagttgcggcttttttgtttgcaaaaagtctctagccatctttttgcgaaatctgttaaatataaagctgactagcaactcgtgatgcgtgaatttgaaattcgtgtagtaattcgcgggtcgaatcaacagcaagttgtcatgggtcattttggatggttttgaggcatggtgagagacgcattctgagacgagttcgggaattcaacttgatagttgttgacttaacgaaaaaactcaagcaaaaaaatatcgaatgatttccaatgattgtagaagcttttaaagacttggctgcaagcagcggttaaaaaaatgcggcgactatcgggtgctggatgaaattgcgaatcaaataatcgccaacgtaaatattgcgagaatggcacgatgccgtctcttcaaacactacttcgcataatatatattatgtaaactagaatataaataattggctttggcacttgatctgcgaatctgggtgtcccctctttcagatggctgtcaaaaatttgtggttcggacgtaatgttggtggtggctgtggtggctattgaactttttaccaaggcaatcaattatgacttgggacgttgcgtttgcgctgtgttgcatgcatttgtttgattgaaaatgtcatgccagccaaaaccagaaaaatgcatatcaattcaagcttcatgatgttgtgagattctcgtcagttagccggcttcgagttgactgatgattttttgagttgtgtagtttgaaattgactcaacaacaattgagggtcacgcaacattcagcaaatttattttattgaccaatggccaaaataagtttgctgaatgattgaccgaagtgaactcatttaatagccgaattcataccagaattatgtcagctaaaatttgtctgaccaacaggcgtttgctgacatctttgctcacctttggataaagctaaaactttattcaattctgcttcacatggcagaacaatggctgaaccagcaccaccgttcatttttcatcaacactagccctcgccaaggacagttgttttcgcgtatactaacattatctaaaagaaaacatacgtttgaggtgaaatctgtgtcgacacaaaattattcgaaattaattcatacaatgctacctgccctgccggattacattcaggactattatcagagtcaaaaagcgatcccgatcgccgattcgacgctctatcagtatttacatttttatcaagagtttctgaactggctgattaacagtggtgtgacggccgcttcctcaccgcaaaccgtcccgctgaccgtgttagaacatttgtcgttgcgtgatgcccaggcatttatggcgtatttgcttgaacggccttccaagacgcaccacaacaagcgaatgacgcgtcgcagtgttgctttgcgcttagtcgggatcaaggcgctttatcggtttttgacggaggaaagtgaaccccatgcagatggcgaaccttatttctatcggaatgtctggaacaaggtaaaacttaaaacccatactgaaactgcgagttaccgaaaccacaagctacaggaaatgctgtttgtggacggtgaagatgctaagtttttacagtggttggatcaaagttatgcgcaacaactgccagccaagccgcggcgctattttgaggcgacaaaagtgcgcaacttggccatgattgccttactgtttggctcaggggttcgagtcagcgaattggtgaatatgaatctggaagatttgaacatggatcggcatacggtccaagttgttcgcaaaggcaactttcaggatcgcgtcaattttgcagactggattgatccgtatgttcaggcttacttaacgcagcgagcggctattattggttatcaaaagccgacttctcccctgtttgtgacagttgtcggccaaaaaatcaatcggattcgccaaaatacaatcgaagcctttttcaagcgttatacaaccgattatggtcggccatcaacaccacataaggcccggcacactttgggaaccaatatttatacggtcaccaaggatgtgcagcaggttgcggatcagctcgggcaaacgaccacaagtgcgacagatctgtatatcaatctcagtgataaaagcggtaaagaagccttgcgtgaggtttctgaaacggccgcaaaagcaactgatcgcgggcatgaccaagcttaattgacgagggatggttactgaagttgatcatcgagtcttttgaaagcttatttcgccagaccggcctataatcgagtcagatcgaaacgggaaggtgggattgattgtgttagatgttaaagattcagtgaaccgattagcatggacaacggagcatcatttcctgcatattcaggcccgacatgattttatgcgggcatgggcagttcaatttgagatggcgtatacggactttcgcgtgattcagatggcgctgcaacttggcggcgaacaatatcatgatttgctaaagcggtttgcggccgcctatgaagcggtgtatgcctatgagtatgcctttgctgctggcgggttggctggttttgacgagcagtttgccgataaaatggcggactatcaaacagctgagcaaacattgttgaagatcattgatgaaatcaaggcactgcagccggcttaattgctggcatcaacgaaaaaaagcgtcgagcgacagtatttttactggcgtttcgacgctttttttagttagctgcgactggtagcttggcgacgcgagacgatgcgatagtacacgttaccggtgagcttgtacatgaggacatagatgatcgcgaagatccctagtgtgatgagtgagacagtcaggaagaactgccaattcggtaagccaaacaatatcatgatgcgttgaatgaatggcaatgcaaatccgacatgaatccctgccacgagtaatggcagataaaacagcattagtaactggctgttgatggttgcgcgcacttctcgcaagcttaagccgacgcgttgtaagatcgtgtagcggcgggcatcggcatagccttcagataactgtttataatacaagatcaataaggttgccaaaatgaaggtgacgccgaaaatgatgccgaggaaaagaaagctgcccatgatactcatggtctcatcgtaattcacggctttcgattgaactgaggccgattcagcgatacgactcttgaccaccgcttcatagagcttaagctgattggcatggcttccttgcaacatcacatcttgacttgtggtgatatcagcttgcgcatcagacgcgttttgatagcgtgcatttctcagatgctgcatggcgtcgatcatttgcttctcttcaggaaaggcaataaaaagattggggataaaagtcgcttgtgcatttggaaagctacctgcacgttttctgatcctgtaagtcttttgaccaatgcgaatggtcttgctaggaaaatttttggatgtatagatcaacacttcccctgacttaacgcgggcatgatgcccggtaaagcggttgtagctctcaatggtcatcaattgcaccgagcgggcattgcccatactgaacggaccattgacattggcctgcgattcaagccgattgccatcaagtaaagccatcgtactggacggtccaacaaaagtgtgttgcgacttgatgatgacatgattcgcgctggccatccgtgccaccttgccgggtgcagtggtgtcgtttgccttgagaacatatgacaaatcaaccggcgtattcgtattgacgacttcattgataccgaagaacaacgtggccgtgctggcgagcgtaatcaaggtcatcgtcaccaaaatggcaatagatgcaagaccagcgccgttttgttgcatacgatagagtaaattagctacattgataaaatgcttgggtttgtaatagtaatttttgcggtttcgcaaccattttaagacgaagaccgatccggcggtgaacagtccataagtgccgcagatgactaagatcacggcaacaaaaaacatactcattgcttgtagtggattagttgttgtgaccgcgatatagtagccggcaattaaggcgataaggctaacaattagcgtcacccactttgtcttgggctcccgctcacctgctcgttgtgctcgcacgatttcgattggccgtttgcgaatgagccaaagttcatcaactaacagcaaaacaacgaataagccgatggtaatgatcccggcgatactgaaggcttgctggcttaacccaaagtcaagattgtggtcaactttgagcattttggcgagcgcaaggtagctgatgcgggaaaggacggtaccgagaataccaccgaacagtaaagtggttagtaacagtagcagcttctccactgccatcattttgccgagttcacctttgccaaacccgatgatgttgtaaagtcctaactgacgaatacgctgtttgcgcagaaaattgtttgcgtagatggcgagaatcacagagataatcacgatgacatctgtgccgaacatgaacagtgacttgccagcggctgcccccagctttttaaacaagacatcactactggcgtaagcattcagcatgattaggttgacggccatcaggaagctagtggtggtgacaaacggaacaaacaggcggcgatcggctttcaagttacttgcagcgagcttaaagtagaatttcattgtccatcgcctgcctttgttagcatggcggtcatcgtctcgctgatacgggttagaaaggctggttgatcgagatccccacgataaagttgatgaaaaatttgaccgtcgcgaataaataatactcgtcggctgtgactggccgccacagcactgtgcgttaccatgaggatcgtttgccggttttcggcattcacatctgtgagcagatcaagcagttctgtagaagttttagaatccaaggcgccggtgggttcatcagccaacaaaatttctggctcggtgatcatcgcgcgcgctgccgccacgcgctgttgttggccgccggaaagctcgtaaggatattttttcagcaaggcatcaatgcctagtcgtggtgcgagcttagttagccgatttctcataatttcgagaggcttcttggcaaggactaatgggagaaagatgttgtcttgaacattgaaggtgtcaagcaagtcgaaatcctgaaagatgaaaccgaggtgttctcgacgaaacttagcccgggcaccttccttgacgttgctcagatcctgtccgtttagactaatatcgccgccggttggatcgtcaagcgttgcaatcagatttagcaaggtgcttttgccagaacctgattcacccataattgccacaaattcaccggcttcaacagtgaaactgatgttcgtcaaggcacgcaccggctgagccccgcgactggtataagttttttcgatattttttaatttaagtaatgttgacatgtgatcgtcccctttcatttattagcttagcggggatgatgccccatgcctacttacagtgactcgtagttgcttacaagctggtaaggtagcttactccacttgccaccgcgtttggggaaaatgaatggcaaatgtgctgccttgcccaatttctgaggtgacagttagcgtcaagccaagcttttcagcgatttgtttgctcaaaaatagccccaaaccgctagctttctgatttgcgcggccgttgtagccggaataaccttgttcaaaaatccgcggtaaatcttcggccaaaatcccgataccggtgtcggccaccatgacagcatcccctttggcataaatcttaattgaaccgtgcggggtatatttaatggcattggtgagcaattgttcaaaaataaaatgcagccattgactgtcactaataacagttggcaatggccccacagtcacggtcaggtccttggcgataaacagcttcgccaagtcacgaacggtctcattgactaacggtttgagtggcagttccgttaaaacaagatcggtatttaatgttgtcaacttcagatagttcaacatgaccgcaagataccgatcgattttgctgatttcaagtcgggcatctttggcgttaacaggttcgacttgcaatagaagatctaacgcggtcagcggcgttttgatttgatgtgtccatagctgcagcgtgtcgagcgtttcttgttcttgttcgtgggcagtatctctggttgtgcgcagcttttgcgtcagcgtttggattttttgataataagccaggcttaatggatccgtgatctgcacaggatcaattgggtgatcgtcttgcagttgctgccattcacggcgaaaacgccaataatcaatgctcacaatcactgccagtggcgctgtcgcaaaaaaccacatattcaggacaatctcaaaggagttggccaacaaccagcttgccaaaaaacctgttgccagtaaggtcgctagcaataaccaaattgcccaacgcgagcggcaataagctttcatcatggctttgtcccctcacttgccaaccggtaccctttacccttcactgtttcgattagttgcgccaaaccaattgaagtgactttcttgcgcagacggttcatgttcacagctaaggcattgcgatcaatgaaatcgtcgccttcccacagcttttcgatcatcgcttcgcgcgacaccacctcaccgtcagcgctgaacaaaagactcagcaattttgtctcagtcggtgtcagagcaacaacctgcttagccgtttttagctgattatcggtcggcacgagcgtaaaggcgccgtgcgataaattggtgtcgatttgctgatattgataagtgcgccgcagcatcccttgaattttcgccagcaacaccggcaattcaatcggcttagccagaaagtcatcggctcctaagttcatcgccatgacaaggttcatatcatccccagaacttgttaaaaagatgacaggtaccttactatgtttgcgtaactcacttagccagtgaaagccattaaaatatggcagactgatgtccatgatgactaagtctggtgccgccgctgagatttccgcgtcaacttggtcaaacttggtgaccgtgctgacggcaaacgcccagcgatttaagtaatcactaatcgttttggcaatcaccgcgtcatcttcgacaataaaaattttctgtgccatctcgtatacatccccttgggtatcttcaacttgttttgtgagtcagaaactgccattcaaatgtgctaatagttcgtctggcctagatcataggtttttacatcactttgatttacactaaggacagtttctattctaactgatttcgggtgttgagagtgtcacataaaaatctaggttggcaagcgcaaacagcagcgtttcttctcagtcaaaatttatttgtttttggcagttcgaccgtgttctatgctgtgttgtgggatattgcgctaaaaacgtcgtcaggggcatggatgacctatgtctcgctggcgaccgcgttgccagcgattttaatctcgctcacggctggcgtgttggccgatcgctataatcgtaaaatgttaattgtgctctcggcggctgttgtcaccttactgacattattagttgcgtctatctttgcttttatgacgcaagatctttggttgctgctcgtgattgctgtgattcgtagttttggcaacggtttagaaaatcccgcggcgaatgccttgttgccacaactggtccctgccaagcatctcacgcgggtaaatggttacaatcaaatcctgatggcggccatgctcgtgatgtcgccgctgttggctggttatattttaagtgaccttgggattttttggatttttgtggtagacgccttatctgccgcgttggccatcctgtttttgagtgtggtgcacgtaccaacgccgagtgccagtcatgatcgagcagccaaacgcgccgatgggattctcgccgggttgcaatatgtcagacgaacaccgattttgctggccttcatgctatttactgggttggcgtttatcctcgttgccccttcatcacaattatcaacattgtatgttaatcggacatttggatcagaagtttggcatttgacgtttaatgagtggttttggaccattggcgcgggacttggcggcctttatatcgcccgtcacaaacattttcgcgatcaacttggcttgattgccatcgggtttgccggcagtgggcttgcctttgccgagatgggactgccgcaatcctttagcttctatttactgtttatgtttgtttccggaactttttacccactgattcaagccggtcaaaccatttatcttcaggaaaatgtccctgctgataagttaggtcgtgtattttcgctttgggccatcctatcgacaggaatttatccattagcaatgttggtctatggaccactggcagatcaggtgccaattggccgcatttttgtggtcacaggcttgttgctcattggtgttgcttactggttctggcaccggctgcgcaaactttcgtggtaagccattctgttctttagttgccgctagcagcgctaatgggccaaaattcaaaacaagatcagtgccaaacgtcgacatttttagctatatctggcgtacgacggctctgccttgccatgacgatccttaagtcctattagattatagacaagaaaaaaagaatgattttcctaaagacggccaatcattcttttttatatggtcgctgcccgtgatgcacatcctcagtcggccgattaataccggcgttgaaccttaaacccagttggcaccgtttcaaagccgacttttggataaaaagtcatggcactaggcgctgataacagcatgatcgagacatttggcccctgcattgtccgtaattggagaagtaacttggtggcaatgccttgatgttgataatccttcgtcacagctaattctgacacaaatgtacaataggagcgatctgacacgccgcgtaaaacgtcgattaactgttcatcgtcccacgctgttaataaaacgttggcattgttgagcatgcgttgcatgcggccgcgatcctcagtcggtcggttgatgcccgatgctgttaggacatgaatgaattggtcagcggtaatggcctgactagttgcaattttaatcatggtcatccctccctgccaattcgaaacatgttatcggcttttagcaaccgatgcgttcatagaagccgatcgccgaatctgctgccttcaatgacagcgtgacccgcggaccgatataagcttgcaaagttgtcatgagctgacgcccaaggtgatgaccttcataggcaggcaaaattaaaagatcacttaggtaacagcaatattcaaaatccgtcagacaccgcgcaaagccaatcaactttgcgccatcccacatgctcaaaacaaggggtgtttcgtcaatcatcgtctgcaagcgggtcggatcgttgatcggtttattgaaatgtgtttgctgatacaaatcatggacctgttgaacacttaacggtgcattaattttaatggtatagggcaatcaacccaactcctttttgtgaaaacttgtttcgctgtggcatttctcaaactaaaaagcaatgactagcgttgacgataccaaaaaggccgcgtaaacaagcggcctttttggtaatcatggcaacgtccagcaaaatagtttgtgatgacgcacgcatccacttgatgctgaaatcattgacggcgatcatctttgagttgtgcaatgttgtagcactttatttgaaaacagtgattttgcttgctggtatccgatacagtgagtccggtgcactctttggtttaccaacagcaatcagcaatgtcggcaagaaatgattcggatccaaatcaagtgccggaataattttttcgtgatcgaaacctgtcatggcacctgtttcatagccataggcgcgggcagccaacatgaacgacattgccgcaagactactgttttgaataataaattcgcgtaatgcttgttggttttctttaaaggtggcaacaagattttcaatcattggtttttgatgctcaatcgcccgatcagtcaataaaccagccgcttccgcccgtttgaacagatcctcctcaaatggtcccaagtcggtttcgccaccaataagtaccacagcggacgcggataaaatttccggtgcattggtgccagcaactgcggcgattttttccttggccgcattgctttgtgcgacgacaaaccgcgttggctgcatattcaaggcactgggcgcttttgtcgcataagtaatcatttgtaacaactcgcctttactaatggtgatttccggatcaaattcacgggcggtgtggcgtttaaggacaacttcatcaaaattattgttttccaacatcaaattcacctcttagattttttggacatcttcagaatacgccaaatgtgggcgctttcctagctgtttttcaaaatggtataggttttatgtggaaaatggaagcggtgacattttctgcttagtccatgattagttgtcgctaatgtcatttcgtgaccgcaacgatgcgcttaatagcagcattgaaaaaattggtaggtcaataagcatttgatcccttggtggtgatgcacatgcttgaaagggtcggatcgggttcgttgtcgttatttttttgcttgctgaaacgcagtcatgatttgttgtacggctatattttgcgctgtggtgccaaaagtgatccgtaaccatcccggctttaagccatcacgaaccaaaaagccgtgattcaagagctgttccttcaaagcggccgcttgcttctgcggagcctgaaaaaattggaagttcgtttgactttgataatgtggcagaccagccttcgttaaaaatcgttcccagtcctctcgtgcctgccgaacctgttcacgggttgtctggacaaatgtttggtcgccaagggcagtgaaagctgctagttgggccacactgctcagattatatggcaggcggacggattgcatggtcgctgccagttgctcaggcacaacggcgaagccgactcgaaaattggctaagccgtatatttttgagaaagttctcaagacaaccagattagcaaagtttggtaacaatttgagtgcgctggtagccggataatcgtctgtaaattcaatgtaggcttcatcaatcagaaccaaaacacttggtggcacttgctgtaagaactgttctagctcagtcagtgacagcaaggtgcctgtcggattattaggattgcaaagccaaagcagtttggttttggtggtaattgcctgagcgagcgcctcgagatcaaatgctccggtcgtcgcttgtaccggtacgttaacaaccttggcgccttcaatctgggcatgcaactgatattcggagaaagttggccacggctcaaccacttcatccccagcctctaaaaaagtacgggcaatgagctcaatgatttcatccaaaccattaccaaatacaagttggctttcagtgacgcccagttcagctgcgaccgctgatcgtaaacggctagcattgccatcaggatagtcacggctttgggtgaagtcccaggttttgattgctgtttgtaccttgtcactagtgccaaaaggattttcgtttgctgacattctaacaatatgcggcaatgcgcgttcttgcgccaaatctgccaagggtttttcggggatgtaaggttgtaaatgagtgacggtatgttttagcatgttggcgtcctccttaaaagcgtttgctggctcggaactagcctgttcacgctttgtctattaacgatgccctcttcaaggcattaatatttctcgatttttgaccgttcttgcagtcggctcttctttccttcgcgactagccaattcggtggcaatttgatcaaccgtgataccacgttcaaccataagaaccaggacgtgataagtgaggtcggccacttcaaggataaacgccggatcatctggatttttggcggcgacaatcacttcagtgctttcttcaccgactttttttaaaattttatcgagtcctttggtgaaaagataatccgtgtacgaaccggcaactggatttgcttgacgttctttgatgaaatcatatagagctggaatactttgctttgcttgggtcatgtaagatccttcccttccggataatgacgataaaaacagctgatgtggccggtatggcatgctggaccggccggatcaacggtgacgagcaaggtgtccgcatcgcagtcaactgcaattgttttaaccatttgaatgttgccactggtggcgcctttatgccacaatgttttgcgactgcgcgaccagaaccaagtttcaccggttgccatcgtttttgccaaactttcttgattcatataagcgaccatcaacacttgtttggtggttgcatcctgaacgactgtggtgatcaggccattggctttttcccagtcaagcgtgatcatcgaaccgccacctttgcgtgttttaaagcggttttcacttgcgggacagttaattcgccgaagtgaaaaatagatgctgccaagccagccgacaccgtggtttgcgtaaacaactggacaaagtctgctgtcgaaccggcgccgccactcgcaatgatcggaacttgaacggcggcagtgagttgttgatacaatcgcaaatcaaagccactttcagtgccatccgcatccatcgaagtgacgagtaattcgcctgctcctgcggcaactgcttgtttcgcccaagtgatcgcatcgagatcgactggcgttcggccaccgttaaccgtgacctgatagcgattttgatcagcttgccaacgtgtatcaatcgcggcaacaatcgcttggcgaccaaatttttcggcaccggctgtgagcaaacttggatcggcgactgcggctgagtttaatgagactttgtccgcacctgctcgcaacaaagcgtgcatatccgcgaccgattgaatgccaccgccaactgtcagcggcataaagacttgattggccactgcttcgaccgtttgaaccaaggtgccgcgcgcttcgttggtcgcggtaatatctaagaagaccagttcatctgcgccttgctcctgataagccttagcaatagcgacaggatcgccgacatcttttaactgcacaaaattgatgccttttttgacccgaccgtgatctacatctagacatgggataatgcgttttgtcagcatcttaaccctccatttgtttgagcattgctaattcaatagcgcctgtttgccatgctttgccgatgatggctgcttgaatgccagcggtttgcaagcggtgtaagtcagctagtgaactgatgccgccactggcgatgatcgtggcttggggcatcgcctgttgcaagtccgcaagtaactgggcattcgggccttgcatcatcccatctttggcaatatcggtcacgataaatgtggtgacgccgcgttgttgcatggcggttagaagggcgttagccgtctgctggctggtggttaaccaaccgtttgtcgccactttcccggcgcgggtatcaatgccaaccgcaattcgattagacccgaatctcgcaatagcttgttcgaccaaatcaggatcggaaacagctgccgatcctaaaataagccggtcaatgcctatcgtaagataaatttccatggcagccagtgttcgaatgccgccaccaagttcaataaaagccgaggtttgttcacgaatgcgagtaatgaccgttcgattgatcggacgttgtgcccgtgcgccgtcaagatcaacgagatgcaaatgggcaaatccggcatctgtcagccgctgttcctgatagagcgggtcttcagttaaactcacttggtcgtaatcaccttgcgtgaggcgaacgcttttgccattgagcaaatcaatcgcgggatagagcttcatcttcggtcatctccttgaactttttcaagccggctaggccaatcgcgccacttttttctgggtgaaactgggtcccaagtacattattgcgacgaacaatgctagtcagaggttgtccataatcagtggttgccaacgtaaattgtggcagcgttgttgcatagaaggaatggacaaaataagttgcttgatcagcaaacaccgcagcaaataaatcgggttgcgtgaggctgttggtgttccaacccatgtgcgggacggctaatcccgagtcagtcgggatggcaacgacttcgccgggaatgaggccaagaccggcagtttcgccgaactcgaagctgcgatcaaatagcaactgcatccctaaacagatacccaacaacggcttgccagtagcagcaaacgcttgaatgacaggcaccagttgtcgttgatttaaggctttcatcgcctctttaaaagcgccgacacccggcaaaatcaaaccggaagcagccatgataatcgcggggtcggctgagagctgattgttgacccccagataatcaagtgcttttttaacattgcgggtgttgcctgtatcgtaatcaacaatcacaatcattcaaatcacaccctttgttgagggaatgccttgcacttcaggattaatggcgactgcagcccgtaaactacgacccagtgctttgaataaggcctcaattttatgatgggtattgcggccatacagaacgctggcatgcaggttgaattcaccagcaaaggcaaccgcctggaagaaatcttctgtgacttccgtatcaaagccgcctaatcgctgattagtcaattcggcatcaaaaacgaggtacgcgcgtccagaaagatcgacaaccgctcgggccagactttcatccattggcacaaaagcactgccgaaacgctcaatcccggctttatcgccaagcgcctgcttaaaacattcacctaacacaatgccggtatcctcaatggtgtggtgcggatcaacatccaaatcaccttgcgcatcgacagttaagccaaatcgaccatgtttagcaaatgcatccagcatgtgatcaaaaaaaccaatgccagtagcaatttgaatgccactttgctgatcaaggttgagactgatcgtaatcgttgtttccttggtagttcgggtaatggtagctgtacgcataagttaaacctcctttgcggcagggacacgtttgatgatggcttcagcgtggccatctagcccttctgcttgtgccaaggtgacgactgcgtctgcctgacttgctagtgcttctgagctgtactgaatgaactgggtacgcttaacgaagtcatagacccccagtggtgagaaaaaccgtgctgatccagcggtaggcaaaacgtgattgggtcccgcgacataatcaccgaccggctcagcagcattttgaccaagaaaaacggatccggcattttgaatctgagctagatacgtgatcggatcaggcaactgaacttctaagtgctcgggtgcaattgtattcatcaatgaaaaggcttcgtttatggttgctacaatcgcaatgaatccttgattttcaattgctgctcgcgcgatcgattctcgaggtaaggttggcaattgaatatcgatctgttcgctgactgccgaagccagtttttcacttgtggttaccatcatcgcgcgcgcattggggtcatgttcggcttgtgataaaagatcggcagctaatcgaatcggatcggcggactcgtcggcaatgatgccgatttctgagggaccagcgatcatatcaatagcgacgttgccaaaaacctgctttttagcttccgcaacatagcgattacctgggcccatgattttgtcaacgcgggggatgctttcggtgccataagctaaagcagcaattgcctgggcgccaccgacttgatatatagcgtctacgccagcgagattagccgctgctagtacaactggattaaggccatttggctgcggcggtgtcaccatcacaatctttttgacaccggccaatttagcggggatagcggtcatcaaaatggtggacggataagcagctgtgccaccgggaacatagaggccgactgcagccaacggggtgattttttgtccacgaatgatgccagggtttggcgtatcgacgaaaccgcgttcgatttcattttgatgataacttgtgatattggccttcgctaactgcaaagctttcaatagttttgccggcagttgtgcgggcgcggcatcgatgagcgcttggtcaacctgaaagtcattaacggtaacgtgatcaagcttattactataagtacgcaaagctgagtcaccttctgctttgactttcgcgatgattgcctgaacaatcgtttgtacatctgtattttgggcaacggcggtgcgccgaatgtcgacttgttgcttaagctggcttaacgtgccggttaaaattttcataacgatgcctcctgagggcgaactttttgtaaagattgaataagctgataaatctctgtgcgtttttgtttcagggccaagcgattgacaacgagatgtgtcgagacagacgcgagttcggcgaacactttgaggtggttttcccgtaaggtcgtgccagtttcggtgatatcaacgatggcatcggccataccagtgagtggtgctaattcgacagacccttcaattttgatgatttcaacgtcctcgccttgcttttgaaaatactgttgtgcaatgtgcgggtacttggtcgcgatgagtttacgtttcgtctgctttggatcaaagtctgcggttgaagcaagaatgaagcggcaacgaccagtgttgagatccaacatgtcaaactggcgatgcccttgctcagccagaatatccgaaccgacaatcccaatatcgacggtgccatgattgagataggtcagcacatccggggctttaaccaaaataaagtgaaaactcggatcatcggcaaaaatcaaccgtctgcttttggcttgaatggcctcacagtgaatcccggcagccgcgagtaagggtaagacttgcgtttcagttcgccccttagtgagcgcaatggtgagtgtcataggatcgcctcctttggggaaagatcaatcaagttagcatgctgttttgtcgctgcagcttgagcctctgccaaagtatcgaccagacacagtcttgcattcggggtggtggcaaccatcgctgctgcggcttgccattgcgatggcaggccatagacaaatgtgaggggctggtcaggcgcattcggcaattgatcagtcacggcatcaatgtcaaaagctaagccaaccgctggcaacaattcttgttgaaaacttgccagcaatttgtcatagcgaccgccgctaaaaagatattggtgaccgccatcaacgtaagcatggaagaagatgccggtgtaataagattgtggtggccggctggtgagatcgatcgtcacgcgcaattccggaaattggtctttgagaaaggccaccgtttgttgaagtggggctaagcgatccgtaatcacattcgacggcaataaccgtttcaattcggcaaagatcgtttcgctatcgccaaaaagccatggccactgttgaagaaatggataaagcgggtttgtagcaagcggcgcaatcaggtcttgataggtgcttagctctttagcaaagaaagcggtttgaaatgcatcagccgcggcatcattcagttgaagcgttcgtaagatttgcggaacgaactgggcatcagataactctaacgtgagatgtgtcaatcctagcgtgcgacaaatttttcctgcttcgctgagacatgcccactcggctttgagggagcgatacccaataagctcaatgcctgcttgggtgatctggttataagtaccgcttagacttttcttaactcgaaaaatgtcgccgacataccaccattgcactggcggcacgatactcgtggtactaagcaatctcgcaagcggtaaagtcagatcaggccgcataaccactgattcgccagcatcatcgagcatttgataaggttgttcgccactgacagctaacggtttaaacacatctcgatattccaacaatggggttttgacccgctcgaacccggcttgaatgaattgttgactaatggtttgaatgagattctctttgcgaatggcccgcggcccgaattcgtcgcgtgtgccaataggcagatgccgatttgacatgagttagctcctttcgttgacatgaagtttggcttggtgcttgcgataacgcgctcgcagtcgcagaaacctaagcgctcctggtcgcgcctaaaaaaaaatcgccctcgaaaacgaaaaaacgtttccgagggcgatttttgaccgcggtaccacctcaattttgtttagctcttgcgacctaaacctcacctgccaagtaactgtcagcaattgcgaacagcagttggcagcagtgataacgcaacggatgcgtgacagcttacttagttcagccgtcaagttcatagatgtgtgttcagctggctaatcgcgtcttttcagcaatagacgctctctgttgatcaggatcagcttacttgttctaatcacaacttcatgtttgttaatgtgactttcataatagccatcattttgccattgtcaacctttttttaattcggcgcggataatgccaccacaagttgtggcataaaaaggtgcgcagccagcatcaatgatgtttttttatgaatatttggtcaaattattattttgaaagtaaacattttttttgcataatcagtccactaattagggacctcagtatccgttttaagaaacgtcagtagtaattgtcgcatctctgcatcttgcgcaggtgttccaaaactttggcgaatccagccgggtaccatgctgtcgcgaaccaagtagccatgctgttttaaaaaggcgccaagcgcttggggatcggcgacttgatacaacataaagttggtctgactggcatagtgctgaatgtggttggcctcaaaaaaagctgaccattgctgccgtgctgtcaatagttgctgtttcacggtttgagtgaaggcttgatcctgccaagctgctaatgccgccgtctgactaataccgctaatgttgtaaggcaagcgcacattctgcattttagcaattactcgctgcggcacgatgctaaacccgacgcgaaaattagctagaccgtacaattttgaaaatgttcgcatgactagtaaattgttgaattgcgtaaccagtgacagcgcagacggattcggaacgtcggcgacaaaatcaatataggcttcatcaaccactactagcacatcagcaggcacccgcttcataaactgggcgatctgagaaattggtaaataagtaccggtcgggttattcggattgcacaaccaaatcacctttgttttggccgtaatgtgcgcggctaaatcatcaagatcaataagtccggttgccggccttacggcagcattcaccgttgtggcacccgcgatagctgcctgtagttcatattccggataagtcggccacggttgaagactttcgtccccgacttccaaaaatgtccggcaaatcaaggcaatcatctcatccaaaccactggaaaaaaggagctggtcggggtttacgtgtagtcgttcggccacggctgttcgtaatggcagtgcatctggatcaggataattgcgtccttgcgaaaacgcccaatttgcgagcgcttctttcactttgggcgatgtgccaactggattttcattgaatgacaaacgcgtcagcttggcaagtcccgctgctttcgccagtcgctccggtgtgctgtccgaaacatagtccggcagcttggcaacacttttgcgtaacatcacgccacctgctttcttaattgctttcgagtgtacgcgcaattgcttgaaaagtaaatatattatgcataaatattcataagacaagcgtcgaatcaaagtattggcttgctattgctgaccaagcacggagaaacctagttattttaattaagctgagtagcttttcttaagcaaataatcaggttaaaccataacgcgaagtcatcaaaaaaaggccacaatttccatacaaaggaaaaacgttgaccttttccacatagataatttttattgaaaatttgaagaaatcagtgccaaggcggagcaatcgcaggccagatggggctcagctgtgcaaacaacatagcgaccggtctttgtcgctgatgttgttaggcgacttcgagaccgtgggtttggcggtctcgaagcgccgtcacgcgttccagctccatctggccggagattgcggagtttggcacggcaaagaacccttagcctagatttttcccggattattcgaaatctagtgaatcacaaattctatgcaagaatgacagctcagtcccaacagctaatcaatattttaatctttggcaagaaaggccaaatagtaagttacagccgataccgtttgcgccgaacggattttgccagctttgacacccgcaactaattcagaaaatgggactaatcggctagttacaaattcgtcttggtcgaaatcttgcttcgttttatcagccaaatcaagatgtgccaacaccagattgacggtttcatccgtcatcccttcacttgaacggatagcggtcatccactgcaaatcgtgcgtcacgtagccggtttcctcgcgcaattcccggcttgcggcggtttgccagtcttcacccgggtccatcaagcctgctggtagcccaaaaacttcactgtttaccgcaactcgatactcgcgattgactagcacgcgcccatcatcggtcatagccaacatggccactgcattggcgtggcgaatcaagtcacgctcaactgtgaggccatcaggcgttttaatatgttgcgtcacaacatcgaaaatcggcccatgataatgcggggtttcgctcagaatttttccttttgctagcggttgatcaaaaaacatataggcatctccttcaattgaaaaagccgcgcctaaacgcgacttctgattatgctttcgtaaaatccttcatccaagctaaggcgattgccttttcacctaagtgggtgccgacaactgggccaaagtaagatagttcgaatggaactgttggaaacttctgctgtaaatctgctaaccaacgattggcctcgtctggatcattagcgtggataacaaccgcgcgaaccggataatcaactcgatcaagttcttcttgaaacaaagtctcaacgcgagagtaagcctttttgatggagcgaattttttcgattgccacgatcttgtgactttgatcgtcaaacgttaacaatggcttgatctttaacatgccaccgataaaagccgaggcattgctgagtcggccgccgcgaacaaggttttgcagatcattaacgataaaatactcacccatggttgtgcgtaagttatctaatcgagccaagatcgcctcaggatcatcaccggcttcggccatttgtgctgctgccaaaaccagccaacccatcaaaataacggtaatttgtgaatcataaacataaacctttgcgccttgaacctcatctacggcacctttcaatgtattcacaaaaccggaaattgtgctggccagatgaatactgatgatagtgtcatagccttcattagcaagattctcgtaaagcttcagcatctcgcccagcggcggctgcgtggtgctggggaacgttttggcagtctttaatttggcatagaattcttcggtggtgatatccttgccttcgtcgtaaaccgcgccgtcaagaataaccggaatcggcaccacagtgatgtgatgtttgtcaatttcggcttgcggcagataacaggtactatccgtcacgatagcaattttcatgtacagacacccactttttcaaaaatgattgtctacatcataccataaaaaacaaaaatgtagcgggtgcgcagtcccccaccacccgctttttgctatgccacccaaaaaccggtaaaatgattggtacaattggaaagcgagcggatcaacatgtcatttgacggaatctttacccatgccatggccaacgagctaaatgcaactttaagcggcggccgtgttgctaaaattcaacaaccttatgaaaatgaagttgtgatcactattcgagcgggacgaaagaatcatcccctccttctgtcagccaaccctcaatatgcgcgggttcagatcacgcatattccattcacgaaccctgatgttcccgcaacattcaccatgacgttgcggaagtattttaatgcggccaccttaactgccgtgcatcaggtgcaaaatgaccgggtgctccactttgagttctcaacccgtgacgaactcggcgatgaactcggcttgcggttgatcatcgaaatgatgggtcgccacagcaatattttccttgtcagtgaacgtactggtaaaattattgatctcattcggcatgtgtcggccgatcaaaatcgttatcgtcccctgatgccaggtgccccttacgttgaaccgcctaagcaagacaaaaccgatccttttcacgatccagaccggcgttaccacgcattagaacgcgaggtcacgcccgccttaagtcgcgcagcgttgttgcaacagcattatcaaggcttagctaaagattcggctactgagcttgcgttacgactcaaccaaggcgatgcaggctgggatggtttctttgccgcactggcgacacccgtgccgaccatcacggcacaaggcaaaaaggccgttttcacggcaatcccctacgtgtcattgactggtgagcaaagccaatatccgaccctcagcacgatgttggatgcttattatgaacaaaaggccgaacacgatcgcgtcttgcagcaaggtgggaacctgatccacgtcatcaagaacgtccttgataaagatcgcaaaaaacagcgtaagttgcagcggaccttagaggaaacggaaaaggccgatgattaccgaattcggggcgaagtgttgacgacttatttaagtcaggtcgaacgcggcatgaccagcatcgagctgcctaatttctatgatgataatcggccaatcaaaatcacactatccaaccaactgacgccgtctagaaatgctcagaagtacttcgctaaatatacaaaactgcgtaatgccgttgcccatgtccatcaacaaatgcaggaaaatcaggaagaaattgattatcttgaaggtatcatggcccagatcgacgtcgctagcccgaaagatttggccgatattcggctcgaactgcagcagcaaggctatttacgcaagcaaaagaccaacaaaaaaggggctaaacgccaaaaggtcgcaaaacctgatcaattttatgccagcgatggcaccaaaatttgggtgggcaagaataacttgcagaatgatcaattgaccttgcacaccgctaagaaaaccgatatctggctgcacgtgaaagatataccaggctcccatgttatcatcgatagtcatcagccaagcgagaaaacgttgctcgaagcggctaagttggccgcctatttttcgaaagcccgtgacagtgctaatgtaccggtggactggatcgaagtcaaaaagattcgtaaacccaatggcgccaagccaggttttgtggtttatgaagggcaaaagacggtcgctgtcacgcctgacgtcgagctggtcgacaagttacgcaacccgcctaccaagtaatcgtcacgttcaattgatgtcagtgtctagggggcaatcagaacgatgaaagcatcagacattccttcatccaaaaccgttcaggcgcatatattagctaacaagatcaaacatggctggaacaccactgatacaaatttcgaaatgttattggcctaccatgaaatggctgaattaacgacggcattattaaaggacgatcacgccaacatcgcggaagaattggctgatatcaccatttatctacttggcattgccgagatgacagatgttgatttagcccaagccgtccacaagaaagtcgccattaacgaccaccgcgtgtatgatgcgcaaggccataaacatcttgaataacttgttctgacggcaccaaaaaagctcacgtcgcaaaacgtgagcttttttgatgctgtttaaccttggaacttaaacacaacattgctatcgaaaagcttgagcattttttcaaacaataacttacttagcaaggctgctgcaactggaatcacgatccagcaaaggacaaccagcgggatcgctaggccagcctccatggatgccagcggtccgaccaagccgacaatcccgaacccagaagattgcggcgtaccgctgatagaaagcagtgcaactggaattgccgaaatgatcgcggtgaacaagcacggtactaagataatcggatatttgaacaagttcggcatcatgagtttcatggcacctaaagcaattgccaaggtcacgccagatttgttcacggtccatgaataaacgacaagcgcaagtgctgttgctgcaacccccatcgccgctgcaccagccgaaactccgttcagttggatggctaggccaatggcaacagtcgaaattggactaatgataatcgtggcgaaggagcagcaaattaagattgccatgaaaatcggctgtaaggtcgtaaaactgttaattacatcgccaatcgctgcggtaaatgctgcaataaacggcaacagtaagaccccgatataggcgaccccgcacccaaccaagatcggcatggcaaccactgctgtggagccgaatttatctttgacccacatcagaaccaacacagcaattgaggcggtgatcatggtattaattaaatcaccggtaccggcaccgacataggctttcatggcaggattaaatttcacaacccccgaaccaacaaaggaagcaccagccgttaccatcatctgcattggattgaattcaaattgcaaagcgatcaaaccgccaataatcaacggtgtcgcaagttgaaaaatcacggcaatttgcgtcaacgtgaccgcaaatgtgttggtgccgaagtatttcagaatgccggatagaacagcattggggatgaggccgataataacgcccaaggccgttcctgataaaaccttattaagaaaaacgcgtggcgtcattttctgggacttttcaggtgttttgttgtcttcaacaagcccgcctgctttccccttttgttcgtctacaagtgcatctgcagccgcatgggtcatctccttgttcgtcgaatcagccatcatgtgtcaccccttcattattttgcgtgcagcaactgttccttggcgtggactagttgggttaagaaggtacaatatggggtcggaataccgtacttcttaccgcgccgatcaatcacaccgttaatataatcgatctcagtcaagcggtgattggtaatcaggtcttgatgcatggacggataatgatggccgatcgtgtttggatcccaggttgttttgatgtagtccaccgtgtcaggcacattcaaatcaatgccttcttttgcggcaactgccgagaattctttgacgattgcgacaaccatgtcctcagcggttgaggtgctgccaaattcactcatattgcagtccagaatcgtgcataagccgttcattgtgccattgaccgttgctttcttgtagatcgtatacagaatattatcagagtattcagcatttagtccagcgtctgataacaatttcacgatcttttttgcagccgcggttgctgcttcgccgtcttcgacgttgcgcaaggcgactgaaccgctgccgaatagctttaatttgcctggtccttccattccggcggtccacatcgtattaccaataaaaatattgtcgcgtgtgacatatttttcgatgatttcttcatgaccgataccattcattaaacacagaattttagtatggtcagtgatcaccggctttaatgactgcatcataccgtctagttgcatggatttcgggaagaggatgacgagatcagccactgcacttggatcaattttggtttgttcataggctttgatcttagcaacaacttgttcgccatcgaagttagcctgcaggccatgctcattgatagcattcacattgtcagcccagccgtcaataccgtcgacatcattgcctgcgcgactgagcatcaatgcatagcggccacccatggccccgacaccagcaattgtaattttcatgatctttttcctcctgtcatggcacatctctacagctgttttgaaaatctgtggaaattcaatgttctcaacgcaaacatgtcgtactgtgctttagtaaagatccgactcgatgttgtattgacttaagttcaatttgacatcgttcataaatcgtccggcttgcaggccgtcgagaatacggtgatccagcgacagacacagattgaccatgtcagcgatcttaatgccgtcatcggtgacgaccagtttcttgttgatgctttcgacttgcataatcgctgcctgcggataattaataatccccatagaggcaactgagccaaacgatccggtattgttcacggtgaaggtgccatctgccatatcagccgacgtcagtttcccagcgcgcgtgagttgcgctagacggttgatttctttggcaatcccggtgatggacagctggtcggcatgttttatcacgggtacataaagataatcatcggttgcaacggcaattgagatattgaaatcctgatgataaacaatattcccgtcttgccagctagtgttgatcttcggatgtttcttcaaggcttgaacgacggctttaatgaagaatgggaagtaagataaggaaatgccttcctgctgtttaaagttgtccttcatgcggttacgcagtttaaccatgttcgtcacatctgcttccactaacatccaagcatgcggaatttcggtggcactttgcaccatgtgacgagcaattgttttacgaataccatcagccgggacaatttgatcatgaatcccaggttcaaagttgatcgtttcaggtgctggctttggtgcttccggtattgctgatgcgggcggtgcggttggcacttgggtggttgcttgagccgcatccgaaacgggttgtggctcaggcgctgaggttggcgcgctggcgctaggcgtgtaattgagcacatccttgcgtgtgattcggccattgttaccggtgccgatgacatcattaagattgatgcctttttcttcagctaaagccaacactgctggtgaaaaacgcttgccgccagtggcactaggtttgcttggcgctgccggaattggtactggtgctggtggcgatgccggttgtgcagccggtgaactggtggcggcagctggttcaggtgcacttgctgcgccttcaacttcgatgctcatgatcggtgtaccgattggaacctctttatcaaggtcaacgagataggctttaatgacgccagcaaaattcgatggaatttcggtcgtcactttatctgatacggtttcagctaagggatcgtattttttgacatgatcgcctggtttgaccagccaattaatgatggacgcttcgtgaacactctcgcctaaaccgggcagtaagatttgttcgatcgccatgctattttcccccttcatcaatatgctgcgagcgctttcatttcgttgtaaacttgttcttcgttaactaagaatgctcgttccagcccaacagcatatggcattgccggcacatcaggtcctgctaaccgtctgattggtgcatcgagatcgaaaagggtatcctcggcaatcatggctgcaacttcactcatgatggtgctttccttgttatcctcggtgattaataagactttaccggttttctttgctgctgcgactaaggtttcccgatcaagtggataaagtgagcggacatcaacgatttctgcactgacgccttcaccggccagcttctccgcagcagttaaggcatgttggagcaccgccccatatgcaatcacggtcaagtcgtcaccttcgcgaatcacattagccttgtcaattggcacggtgtaatccgtttccggcacttccgcttttagcaagcgatatagacgtttgtgttcatagaaaatcaccggatcgtcactacgaatcgcggttttaatcatgccttttgcgtcgtatggatttgacggggtgacgacccgcaaacctggttgcccagcaaagatcttttccgttgattgtgagtgataaaagccgccgcgcacgccgccgccatatggagcgcggaaaactgccggcacggtccagtcgcctttgctgcggtaccgcatgcgggccgcttcggaattgagctggttgacagctggtaaaatataatcagcaaattggaattcggcgattggccggaagccaaccagtccaaggccaacacccataccgccaatagcaatttccgttaaaggtgtgttgaaaacccgcttatcgccatacttggcagccaagcctttcgtgacgccaaagaccccgcctttgtcaccgccgacatcttccccgaaaataaggacgttttcatctttcgccatttcttcgtcaataccttgttggatcgcctctaaataagttaattcagccatggttcttcatcctcctttaaacgcgttcaccagcccagaaacctgcgtgtaagtatcttggtcgcaatggtcaaagtccgaccatccacgtccaagatacttttactccggttcctacccgtggcagttcgcgctctcctattctgcgtacaactggtcggtgatcttggctggatctggatcaggcatggcttctgcctcatcggttgcttggttaatctcggtttcaagttccttttcaatgcgatcaatgtcggcttcgttcaggtacccttcgtcgattaattgttgttggaaaagcttcaccggatcgttttctttgatttcggcaagttcttcggcactacggtatactcgctgatcatcgtcggaagaatgactggtgagtcgttcaaccatgatctcaatcaaggtcggaccgttgccttgacgggcatccgtcactgcttgcttgaaagccagataggtttcagcaaagtcgctgccgttgactcgtatcccattaaaaccgaatgccgggccgcgatcagctaacttttcaacggcatattgttctttgtctggcaccgaaatagcgtatccattattttcaacgacgaagactactggcatcttgtgcacgcctgcgatgttcatggcttctgcacattcaccttgactaaaggagccatccccagtggtaaccacggtgacatagtcttcaccacgcatctgagcaccataggcaatccccgcggaaattggatactgggtgctgactggcgaggagtgactcacaatgttatgcgccttgctgccgtaatgacttggcatttgacgaccatgtgaagctggatcggcttctttcccaaaaccggccagcataatatcttttgtcgtcatcccccacatgagcactgcggtgagatcccggtagtaaggcagaaaataatctttgtcataatcaaacgccaacgccatagcagcttgcccgacttcagcgccttgtccggaaatgttaaacgagaatttaccaattcgggtcagttgccataaacgttcatcgacgcggcggccacgcatgacggccttatagacgtcaagaatggtctcgcgactcaatcctgtcgttttcagtttccctgtcgttttcattttttgcatcagactcactcgctttcttatttgtgaatggctatcttgtgggtatctaaagttgcttcttgaatggcttccgatagtgatggatgcggatgaacggcatcaccaatctctgtagcagaggcatcgaggtacatcgcgtcactcatttcggcaatcatgtcggtggcgtgggcaccaatgatgctgacgccgataatgtcatcggttatcacatctcgcagcacttcgacaaaaccggctgtatcgcccaaaatgatcgctttagcattggcattaaagttgaaccggccaattttcacgtcgcgatcttgcggataattggatgaggtatagccgacactggcaatttctggatcggtgtacgtacaacgcggtacatcattgtaattaagcggtgcaactggtagaccggccatgtgttccaccgcgatgatgccttctttcatcgccacatgcgccaactggagggtatcgatgacatcgccaatcgcataaatgtgatcttccgttgtttgataaaacgcattgtgggtgatgccctttgccgaatacttaatcgaggtattttgtagtccaatgccttcaacatttggctggcggccaatcgcaaccatgactttgtcaacgattaagggatcgctttgttcagcgatggtcagtgccacctgcttatttttgatcgttgcctgttccactttggcgccgagttggatgtgaatgccgcggttttcgagttgtttctgtaattcacgggcaatcgtttgactttcgttgatcaccaattggtccaaaaattcaacgatggtgacatccaccccaaagtcattaagcagagacgcccattcgacgccgatgacaccgcctccgatgattgcgactttcttcggtaaagccgtgagttcgagcatgccgttggaggtcaaaatcatcttttcgtcaattggcagactcggcaaagtctttggactagagccagttgcgatgatgacgtgtttaggtacgatcatcacgtcttctttgcttttgtcatcgaaggttaccgagacagttccagataccggtgagaaaatcgatgggcctaaaaccgcgccagttccgttaagaacggtgatcttatttttcttcatcaatccttgaaccccgcggtaaagctggtccacaacagttgctttacgcgcttgaatcttagcaaaatcaatgccgactttgccttcgatgatcccgccaaatgtcgcagctgattgcatcagtcgcagtgtttcaccgctatgcaacagtgacttggtggggatgcagcctttgtgcaaacaaatgccgccgacttttgctttctctaccaaaacgacctgcatgcctaactgtgcggcccgaatggcggcaacataaccgccgggtccgccacccaggaccaccagatctgtgttcattgtcatctgccagttccccctttgattgttgacgcgtctgattgataaacgcggacgggttcttcatgattcaaaacgcgcatcaccccctcatagagtgcctgcatttccatttctcctggtcgcactaccaccggtgcaatccaggctaaatcatgttgcagcggggctgtcacagcagtggcataagcagcgccgccagtcaaaataatcacatcaacctgaccatttaaaacgcccgccatttcggcgatctgttttttaatctgatagatcatgccatctaagtagaacttagcggtttcgtcaccctcagcaatccgagcgacaatgtttttgatactgatatcgtttaggtacgagcgcaaaccactttgactagccaataattttttgacttggtctagcgtcagccgctcagctaataccttggcaacaaaatcaactagcggcagtgaaccagcccgttctggtgagtacggtccttcaccatcaatgccgttattgccgtcaatcatgcggccgttttcatgtgcatggatgctgagacccccgccgatgtgcgcgacgatcacacggcttgtggcataggtcttgcccatagtagccaaaacttggcgggccatggctttttgatttaaaacatgggccgcactgtgtcgctcgattccttttaaaccactgatacgagcgagcggctgcaattcatctaccacgggtggatccaccacatatgccttgacgccatattgatcagcgacttgctgtgctagtcctgcaccgaggttacttgcatgttcgttgcgtttggctgcggttaaatcatccagcatcgcctcattgacagcatacgtaccgcccggaattggttttaacaatcctccgcgtccagcgactgccagcacttcgcttgctgaaaagtcctgatcggctaaaaattcttgaatggcttgcatccgaaaatctttttgtgcaataacggcatcaaattgacttagctcggctaaggagtggttaagtgtgcgttcggcgaccattttaccagccttaaataaggcgattttggacgaagttgagccaggattgatcacgatgacaacatcgcgttttggatgcatggtcatgaggcaccgcctttcagttgtgcaatcgcgaatgccagcgccgttagtttactatcaacggaatcactgcgcgaagttaaaactatcggcactttggcccccacaatcgtgccgcctgagcgagcattcgtgaatagcatcaacgccttatataaaacattgccaacatcaatggttgggacaattaacacatcggcatcaccttgaatcacgccttcataatgtttatgcgccacagatgctggtgataatgccaaatcaagcgagattgggccggcaatcacggcatctgagcgcgtttcaaactgttttgcgaccgcctgcgccaaaactgaggaaggcattttcggattaaagttctcggctgcactgagtagcgcaacttttggctttggcaaaccaatttgatgcgcaacgcctactgcattttcgacaatggcggccagcctgtcttcgtcgggatcaatattcataccagcatcgctcaaaagaagcggccggtttagttgtggcagatgaataatcgcaacatgagacaaaactttctgaagccgcagttgatagtcaggacgaagcagttctttcagtaatgtatgcgtttgcacaatgccctttagtaaaatatcggccttaccttgagcgactaaaccaaccgcttgcgtcaccgcgtccgcttcatcgcgcgcctgatgaaacgtccaagtgtctgcttggtcaacgttcgaaccgctatcaaacacaacaaattgcagtttgtccgccaaggtcgaagcgagctcactgcgagcacgagttacaagggttaatatgtctggttgcgaacccattggaatagcaactgtgatcatcctttcacctccaaagttgataaatggtatcttgccagtggccatttaaattgcgaacaactgttgtataacaattaaccggatgacgtctattttccataaattttactcataaattaatgaaaataagtatataagctttaattgcccctatctgtagtataacagttggtgtcgatacagcaagaaaacgcggctcgattttcctgaattctcatgaagctattttgatgaaacctgaattcaacgcattgtgcatataaatgcaatcaaatcattttctaataaatcagtttaaaatggattttactgcttaattaatccaatatcagtcaaaataatttttttatttgccactatgtgaatcaacgatcatattctgaaattctcatttcctcatggcttgcttagattgctcaccaatgcgacttggtttcgataaattaacgaatgcagcttcacgtcatcggcaaggacaaaaaagcacggttacttcaaaatattttttgaagtaaccgtgcttggctttttcgatttgaacatgggactcaattggtgcggcttattgaaactgtgcgccccacttgaccggatcttctcgccattgatgcagtgaagcgagttgcgtactagtgatggcgccttgtgcctcggctgtttggatcaaagccgtatagtttgtcaatgtgaagaacggtaagccagcatcggcaaaattagttttgaccgcggctagttgataactaaagattgcagcgacgcctaaaactgtagcaccatctttttgagcggctgcaaccgcgcctaagactgatccgccagttgagagcaaatcatcgatgaccaccagcttagcatcggctggcagatgcccttcgatttgccgcccttgaccgtgatccttaggcttactgcgaatgtaaaccagcggtaggttcaacaagtttgcgaccaaagccgcatgtggaatcccagcagtagccacgccgccaatcgcggtaacatcaggatagtgagccacaatttgctgcgccaaaccagctgcaattttactgcgaacgtctgggtagccaatggtcaagcgattatcggtataaattggacttttcatgccgctggcccaagtgaacggtgcatcaggacgcaaggtgacggcctgaatacggagtaagtcgctggcaatttgtgtttctaatttagtcatgtgctgtttcccacgcttccttaattgattgataagccgccaccggatcatcagcctgcgtaatcggccggccaacaacaatcgctgaactgcctaaacgcttggctctgcccggggtcacgactcgtttttggtcgccgactgccgcaccatacggtcgaattcccggggtgactaccagaaaatcaggtcgcgtcacacttcgaatgagtggtgtttccaaagcacttgccaccacaccatcggcattacttgcctgcgcgatggctgcaagatgctgaaccgcttgactgatcgggatctcaatcgaaagctgatttgtcagcatcgtctgatctgtagaagttagctgcgtgatcgcaagcatttttggtgctggatgaccagctgcctttgcgccagccaatagcccgcgtttggctgcgatcatcatgtctttcccacctgctgcgtggacagtggtcatcgccacacctagtttacccaattgccacgccgctttttccacggtgttagggatatcgtgaagttttaaatcgagaaaaatcgacaccggtcgggcttgttgaatctcggtgataattgctgggccttcagcatagaaaagttccatgccaactttaacgaacaaatgttcttcttttggaaattggcttaaaaaatcaagagttgtggtcttatctttaaaatccagtgcgataataggcgtcataaaactgtctgtccttcctgtatggctgccaattcagccgcgatcttcggaatggctcgcttttgataataattggctgaaccaactgcaagtgccgtggcaccggccgccaacatttctgctgcatcatggccagagctgatcccacccatcccaatcagcgggacgcgaacggcatgagccacttgataaaccatgtggagtgccattggcagcaaagccggacctgaaacgccgccagtcacattgtcgagaagcggtttgccagtggcaatatccagccgcatgccgacaaacgtattgatcagtgaaagaccatcggctcccgcttgttcgactgctttagcaatggcagtgatatcagtcacattcggcgtcagcttaacgaaaatcggcaccgagctcgcggctttaaccgcacgcgtcacggccgcagcgacttctgggtctgttccaaacgccatcccgccttgcttgacattcggacaggagatgttgacttctagtgccttaacattaggagcggcactcaattttttcgccactgctgcgtattcggcaacatccaccccagcaatactagcgataatcggcaaatcaggatactgcgtggccaaccatggcagcttttcgtgcagcacgacatcagaaccgggattctttagacctactgcattcaaagtactgtcagggccgtcggcaaaaatagtcccttgattgccgatgcgcggtgcgagtgtcgtcgattttgtgactaacgcccctagcaaattgagatcatactctttggcgtaaccttcgccaaagccaaacgtcccactcgcgggcattaacggatttttcatcgtgaaacccggtaattgaatggccatgtggtacctccttatgtgtaggctgctgcgactgcaagtgcgttaaagcgtgcccgtcatgctataaaagctaaaatagcagcgttaataacgcaacgagcattttgatggtgatcatacctagatagtgttgaaaaaatcactttgtatggcaaggcgctcaacttttaatcggcgatattgaaaatgcttgtaattctagaactttcaaaatggctccagctgtgtctagactggtcatcaatggcacgccatgttcgatggcagcttctctaattcggaaaccgtcacttgaaaccttcttatctgcactcatagtgttaatcactaattgaattttccgattggcaatgtcttcaagaatcgtctcctggccactgtcaagtttctcaatcgttgacactgtgataccggttttctcaaaggccttagcagtgccgcttgttgccactagttgataaccaacttcgcggaatcgttttgctagtgccgttgcttcagccttgtcagcgtctttaaccgtgatcaatgcccggccaaattgtggcaagtgcatgccagccgcttcaaaagctttgtacaacgccttcgcaagggtggtgtcgctgcccatgacttcaccggtcgatttcatttccggcccaagcagactatcaacgtgattcaacttcgaaaaactaaacaccggtgatttgacatgaatacctgactgattcggcaacaagcctgtttcaaaaccttgttccttcaaacttaaaccaagaattgccaatgttgcgacttgtgccagtttgatgttggtcactttactcaaaaacggcacggttcgactggcccgcggattgacttcgatgacgtaggctttaccatcgtgaatgatgaattgaacgttcatcaagccaatgcagtttagtgtccgcgacaatttaatcgtggcatcggtgatttgatcgataatgtcttgactaaaggtctgcggcggataaacagccatcgaatcgccgctatgaatgccagcgcgttcgatatgctccatgatccctggcaaaacaacggtgtcaccatcagagatgcaatccacttcgcattccttaccgactagatagtggtcaatcagcacaggatgatcatgtgaaacggacaccgcccgatcaatataattgtcaagttcagttgcgtcgtgaacaatttccatcgcccggccgcctaacacgtagctaggccgaaccaaaaccggatagccaatcttatcagcgaccgctaacgcaccggctttatccgtggcggtaccgccctctggttgtggtaacttaagtgatttaatcacctgatcaaacaagtcacgatcctcggcccgattaaggtcttcaactgaagtgccaagaatcttaatgccacggtttgccagcggttcagccaagttgatggcggtctgcccgccaaattggacgatgaccccttctggctgttccagatcaatgacgttgaggacatcttcaagggttaatggttcaaagtacagcttgtcagcaatcgaaaagtcagtcgacaccgtttccggattactattcatgataatcgcttcatagccggctttttgaatggccttaacactgtgcacagtggcgtaatcgaactccaccccttgaccaatccgaatcggacccgagccaatcacgagcacactcggcttgtcgcttttaacgctttcggtgctactttcataggtgctgtagtaatacggcgtgtcgctggcaaattcaccggcgcaggtatcgaccattttgtaaactggtagtatcttttgttccttgcgcatctgtcgcacttggtcagcgtgcaggccccagagtttggcaatctcttcgtcggcaaaaccgtaccgctttacttcggcgagcaaccccagatcagctttatgtgccgccagttcccgctctaattccacaatatgtttgatcttgtcgaggaagaatgggttcattttcgataactcggcgacttcttcaatggtgtagtcgcgacggaaagcttcagcgagatagaaaagtcgttcatcgttggcttgaatgatctgtttgctcagttcatcgtcgctcaacttggcaaaagctggccgttctggatgaattagtccaacttctaatgagcgcaccgcttttagcagactttcttcaagcgttcggccaattgccatgacttcgccagtggctttcatttgggtgcctaatgtgcgatcaccgttttcaaacttatcaaacggaaagcgtggcaatttggtgacaacatagtctaaagccggttcgaattcggcccaagtttttttcgtgaccggatttttgatttcgtctaagtgcaggccaactgcgatcttggcagccattttcgcaattggataaccagtagctttggaagccagtgcactggagcgcgacacccgcggattgacttcgatgacgtagtacttgaagctgttacgatccaaggcaaattggacgttgcagccgccttcgatcttcaacgcgcgaatgattttcaacgcagcatcgcgcaacatctggacttctttatcggtcaacgtttgggttggcgcaaagaccatcgaatcgccggtgtggacaccgacaggatcaaagttttccatgttgcagacgacaattgcagaatccgctgcatcgcgcataacttcaaactcgacttctttgtagccggcaatggagcgttcaaccaacacctgcgtcacggggcttaggttgaggccgttttccgcaatttctgccaattccttttcgttgttcgcaatcccgccgccggtgccacccatggtgaaggccggtcgaatgataaccggaaacccgattttatcggcaaattgttgtgcttcttcaatgttattggcgatggctgattcaggtactggttcatggagtttttgcatcaggtttttgaataattcgcgatcttcggcctgatcaatcgccgtcaacttggtgcctagcaattcaatacccagttcatccaaaatgccggtgttgctgagtttcatcgctaaattcaagccgatttggccgccgatggttggtaaaatcgcatcaggtaactctttacgtagaatctggctcacaaattcgactgttaagggttcaatatagacgcgatcggcaatttccgtgtcggtcatgatggttgctggattggaattgaccaaaaccacttcataaccttcttcgcgtaaagcaaggcaggcttgcgtaccagagtaatcaaattccgcggcctgaccgataataattggaccggagccgatcactaagattttatgaatatcttgacgttttggcatgattatcctttctgcgtgcgatttgagaatgcatccatcatttccatgaactcatcaaaaagatgatcggcatcatgtgggccaggagcggcatctggatggaactggacagtaaaggcaggatacaatcggtgccgcaaaccttctactgtaccgtcgttgatttccacgtgggtgatcaacaaagtatctggatcaatgctgtcaggatcaaccgcatagccgtggttttgactggtaaaatcaattcggccggtggcaatttcacgaaccggatgattgaaaccgcggtggccatacttcattttaaaagtgttggcgccattggcgagtgcgaatagttgatgccctaagcagataccgaacagcggaattttgccttccacgccacgaatcatgtccagtgcttcaggaacgtcttttggatcaccagggccattggtgagcatcaccccgtctggcgctaattcgagaattgttgaggcggtggtggtggcaggcagcacggtaacattgcactgccgtttggcaagttcgcgtaagatactatgtttgagtccgaaatcaatgacgaccacgttgcggcctgtgccaggagctgggtaagcctgttgggtagaaacctgctggacttgatttttaggtaacacgagggctttcaattgatcgaatgcgtgctcatcggctgcgtcgacaatactagccttcattgccccaacttcacgaatcttcttagttaaggcgcgggtatcaacgccactgatgccaggaatgtgtttgcgtttcagaaattcatctaaggtcatttgactgcgccaattgccggtcactcgggcaacatcgcgtaccacaatcccctttgcggttggatcgatactttcataatcgtcacgattgatcccgacgttgcctatcagtggctgggtgaaggtaatgatttggccgttgtaactttgatcggtgatggtttcctgataaccactcatcccggtgttaaagacgatttcgcccgttgtaacggtttccgcaccgaaaccgacgccagggaaaacgctgccgtcttcaagaattaaatagcgcttcatgcttgtcctcctctaaaggcgttcactagatcagaagccgatctggtgagcgctttgcttaaacccgtttgcctaatgctaatcgcgtttgttcatactttcttaagggctggctgacgctcttttaaacgtgcttgccagctagaagcccaagctggttcacgctcttgcgtaagcaatttgcccctgactgatcgtgtacagtgtttgaccgttgactttatcgccaataaaaggtgaatttttgcctttggagaaccagtcggctgggtcaatggtgtaaggcgtatcgagatccataatggttaaatcggcaggtccactgactgtgatatggccgcctggcagatcaaatttctcagccggaatcgtgctcatgcgtgcgatcagctgttttagggtgaacatctttgatttaaccagcttggtatagagcgttgaaaaggccgtttctgacccaacaatgccaaatgccgctgttttgaaggaaccggttttttcagcagccgtatgtggtgcatggtcagtcgcaatcatatcaagcgtaccgtcttgcaagccttcaagtaaggctaagtggtcggcacgtgagcgcaacggcggattcattttaaacattggattgtcgcccggaatgttattctcatccaatagcaggtgatgcggtgagacttcagcggtgacgtttaccccgcgttttttagcttcgcggattaggtcaacgctttgccgagtcgacacgtggcaagcatggtaatgcacgccggttgcagcggcaagttcaagatcgcgcgctaactgactgctttcggtttgattgatgatccccggtaaattcagtttcttggcaactggaccggcattgatcaccccgccatgcatcagacttgcatcttcaatatgagcaacgataggcgcatgcaacttagcagcctgttgcatggcttgatacatggtgtcggcatcctgaaccccgaccccgtcgttggaaaagcccagcgctccagcagcttgtaaggctgccatatcaacgacctgatcagaatgcaggtcatgcgtaatcggtgcaaactgcaaaaccgtgatcttcgcatcagtttgatttttctcaagcagtggttttaaggtttcgacagtgtctggtaccggtttgagattgcccatggcgacaacagttgtgaaaccgccgtgagcagccgccgcagcgccagttttgattgtctctttatcagaaaagccgggttcgcgaaaatgcacatggacatcaattaatcccggcatgacgatggcaccagttgcatcaatcacctgttcgtgatcgcgcggcgccagcgattgaccaatcgccgagataatgtgatcggtaatttggatgtcagccatgtattcagtatcgctgacaatatgggcgtgtttgatgagcatgggttactcctctccaaaatgacgggcattaatgacggcctcaagcatggccatccgcatgaagacgccgttttgcatctgagtgaaaatgcgtgactgcgggccatcaaccagatcactggctaactcaacatcgcggttgactggcgccggatgcatgaaaatcgcgccaggtttcattgtcttagcaagatcatcggtgatgccgtactttgcatggtaggtttcttttgagaaagcctgacggtggtcggcgttgaagcgttccaactgaacgcgcagcagcatcaaaacatccacctgcttgaccaattcaggcacggtgatgaaatcaccatattgatcgaaactggaatcgtaccattgctctggaccggcaaagtgcaacgtggctccgagtttatgcagcatctgcatatcactgcgcgcaactcggctgtgactcaaatcgccaacaattccgatactcaagccgtcaaaatgaccgaattcttcgtgaatcgtcatcagatccagcatcatctgggaaggatgctggccggcaccgtcaccagcattgacaatcgctgtcgttggccatgcacctaaaagatcgttatagtagccatcttgtgcatgtcgcatcaccgcaatgttgactccgatcgccccaatcgttttaatggtgtcttcaagggtttcgccttttgaaaccgaactatgtgccggatcaaatgggatgacagtcagacctaatttgcgttcagccatctcgaaactagtgtgggtgcgcgtgctgttttcaaaaaataagttagctgcgtatatcggctctggaaaatggacggtttgaccagctttaaaatcttcggcgcgattgatcaaagccatggcgcttttgtcatcaacttgttcagcggaaacaaaatcttgaaaggatgtatctgtgaaattagataaggtcatttttttctgcctcttcttcattagcggcgtgttcaggtaagacaaagttcaggaagatcccgatcacagttgccagcgccagtcctgagaattgatacccggagaactgtaggctggcattgccgatgccgatcacgagaatggttgaagcaatcatcaggttgcgcttctgatcaaagttgactttgttgtcaattaagacgcgcaggccgttggaagcgatcaccccaaacaacagaaagctgatcccgccaataactggactgggaatactacggatcaaggcgctaagcttaccgatgaaggcaaacaagatggcgaagaacccggcaccgcccagcacatagatactatggaccttggtcatcgctaaaactccgatgttttcaccataactggtgacaggtgggccgccaaccagaccggcgataatggatgcggtaccgtcaccggctagggtgtggtttaaaccaggatctttgaagaagtcacgtttagtcagcttgttgagcaccatgatgtgccccatatgctcggtcatagtgacaaaagcaattggtgccatggagagaatcgcgccccaataaacttgcggctgataactgataaaaggaatttcaaacttaggcaggtcgaaccaagcagcctgctgaactggtgtcaaatcaacaatgccaaagagcaaagcaacaagatagccagtgataatgcctagtagaattggcaacagactaatgaattttttgaggtacatattataaataatgacagaggctaaagtgatcattgcgactgcgaagtaacgtaagtcataaacgctcttggtggcgctgatggtccgcatcgttgcatcagtggcagcagtgccggcaagagataggccgataaccatcacaatcgggccaaccacaactggcggcaaagcccggtcaatccatgctgacccgctgcgcgctacgatcaaggccacaatgagatacacaaccccaaccgcgatggtgccttgagcgatggccggatagccagcacctttcatcaaggcctgcatgatcgtgataaaagaaaagcttgatcccatataagccggtattttgccgcgtgtgatcaggatatacattaacgtcccaaccccacttgaaaaaagggcaatgctaggatcgagtccaactaagatcggcacaagaactgtcgagccgaacatcgcaaacagatgttgaatagaaaggccaacccattgaccgaattttggcttgtcgccgatatctaaaacggcttcgtcgttgtgaaatgccatcttagccctccatcctttcgatgctgatcccgtctttaccgtcaagctcagaaacttgaacctgaatttgttcgtctaatgaggtcggaatgtttttaccgacaaaatctggacgaattggtaattcgcgatgtccgcgatcaaccaagacagccaagctgatcttgcgaggccggccttcgtccatcaaggcatctaaagcagcgcgaatggtgcggccggtgaagatgacgtcatcaaccagaatgacatgtttgccggtgatattaaccggtaactgtgcgccttcaacatctggctgatgatcatgatcaatcttatggacgtcatcgcggtaaaactgaatgtccaattcgccaaccggaacctgtaacccttcaagttgttcgagacgcttggcgatccgatgggctaaataaatcccgcgggttttgatgccgactaaaacgagatcgttgagtcccttgttttgctcgatgatctcgtagctaatgcgtgttaatgcacgtttcatggttacctcgtctacaacttgttttgactgtgccattgatgtgccaccctttcttatatgtattgcggttttggtgctttggaagtgaacagtgatgcgggtgttacgctccgatgctggcatttcctaaacgcgctcgcagtcgcagaaacctgcacataaggacctcagatctaaatggccggtctttggccatttagatctgaggccacttatgctccggtttctaagcgctcctgctcgcgctctacaaaaaaagtcgccttcaatccaatttgggatagaaggcgaccgtagcctgaataatccgccgcagcggaatggaccttctaagcctcactggacttagttaaaggtgcttgtttgattgcattaagattaccgaacgttgcgggtcttgtcaatgcctgcacgtagatcggctaaggttttttcaaaaattggcggtactggtgcttcgaagacgagcaattgaccggttgtcggatgaacgaatcccagtttagccgcgtgtaaaaattggcctttgccgggcagggtgcgttttggcccgtaaagtggatccccggccacagggtgatgaatgtatgccatgtgcacgcgaatttgatgcgtccggccggtctctaaaatgcatttaatgaacgtgtaatgttcaaaacgctctaatacttggaaatgggtaacagcatggcgaccgtctgccacgacagcttgacgtttacgatcgcgaggatcacgacccaatggtgcatcaattgtgccttcatcttctttgaacgtgccatggacaagtgctaaatactcacgaatcgacgttttggcttttaattgcgcggagagacttagttgcgctttttcggttttagcaaccatcagtagtccgctggtgtccttgtcgatgcgatgcacgatgccgggacgaatgacaccgttgatgcccggcaaatcagtatgatataacaaaccgttgaccagtgtgccatctggatgaccaggtgcaggatgtaccaccatgccctgcggtttgtcgacgacaatgacttggtcgtcttcatacacaatatcgagcggaatcggctccggaatagcttccagcggcttggcttcaggaattgagatagcaatcacatcgccgctagcaactttgtaattggccttggttggctgcccattgaccgtcaccaagccatcttgcaaccatttttgcacctgactgcgcgtgtgagtggtttcatgcgccgtgataaccttatcgatgcgcccctgctcggtcgtgatcgtaaaggtgctagtcatcacgccaccgccttgtcatgatcgaacaggataaaaattagcactaaaataaccccaaacgtgatgcacatgtctgcaaagttgaaaatggcattgaagcgccactgatccaaaaactcaaggtgaaacatgtctgtcacatattgaaaccgcaagcggtcaatgaaattaccgatggccccggcagtaatcaaggttagtcctaggcgatagatcggtttgtgcaaactgtcgcgccacagcatggcaacaaccccgaatgcgagtaaggttgtgatatagaaaaaccattgtttgccttcaaacatggagaaagctgcgccagtattgcgaatgtgcgtgagatcaatcacgcctggaatcagttgttggctttcgcctaatggaatgtgagcagtaacccacgccttaatcagaaaatcaattaatacgagcgcagcggcgatgatgagataaataagcacagaagttccccctgagtaaaagcgtttgtttcctagtgtaccgcggtcaaagaaaaaccgccatcttaaaaatggcggttacgcatgagctgattaaaaaccacacaaaattagaacaggccggaaatcttgccatcgtcggtaacatccatgttcaaggctgcgggcacttttggcaagccgggcatggtaagcaccgagccagtcatgacgacaaggaagccggcgcctaacttggggatgatgtcgcgaacgtgaatcgtgaacccttccggtgcacccaacgttttggcgttatccgttaacgaatattgcgttttagccatgcagactggcaaatcctgccagccgtttttaacgatcgtgcgcaaggcactgtttgctttgccttcataatcgacatcagctccgccataaatcttttgcacaatcgtcttgattttggttttgacatcgctttgcggatcatataagcgagtaaaatgcgccggttgatcaagtgccgccaaaacagcatccgcaaccgccaatccgccgcgtccgccgtcagcccaaacggtggcggtgacggctttaacgtttagtttcgcacaagcatcaattaaaaactgaatttcggcatcggtatcactagtgaatcggttaatcgcaactacaaccggcacaccgtaactttgcatactgtggatgtggcgtttgagattgtcgaagccttgggccaaggcttcgacattttccgtttgcaggtcctttaacgcgaccccgccgttatacttcaaggcacgcacggttgcgacaatgacgactgcatcaggcgtcttgccgagtacaggtgttttgatgtccataaacttttcaccgccgagatccgcaccgaagccggcttcggtgattgcgatgtccccgagctgcaaagccgtacgcgtggccaaaaccgagttacagccgtgcgcaatgttggcaaatggaccaccgtggatgaatgccggggtatgttctaatgtctgaaccaagttaggtttcaaggcatctcgcaatagcatcgcaatcgcaccggtgactttcaaatcggccacggtcaccggctgccggtcataagtgtatccaatgacaattcggccgatacgtgccttcagatcggcaatgttttccgccagacacaacactgccattaattcgctagcaactgtaatatcaaagccatcttcgcgcggcacaccgcttgtgggaccgcccaaaccgatcgtaacatgacgcaaagcgcgatcgttgatatctaaagcacgcttccataaaatccgccgtggatcaatattgagcgtattgccttgttgcaaatgattgtcaatcaaggcggctagggtatccaccgccgtggtaagtgcatgcatatctcctgtaaaatgcaggttaatgtcttccattggaactacttgcgcataaccgccgcctgtcgcaccgcctttcatgcccattaccgggcctaaagacggttcgcgtaaagcaatcacaggatgcttaccgcgttgttgcagcgcatcccctaagccaacggtgatggtcgacttaccttcgccagctggtgttgggttgatggacgttaccagcacaagtttgccaaaaggtttatcctttaaggcgttaagtgcactaaaactaagcttggctttggctttgccataaagttcaagatcatcttctgataaacctaaaccagccgcaactttcgtaatcggccacattgccgtcgcttcattggcttgtgcaatttcaatatcagacatacaacacactccttatttggcggactctttcagccctttttggatcaacgacactactttttgttttctttttttaccgaacaaaacaaaagtcacttgaccatatcgtttggttttaagaataactgtcaaatggccaaacgtaaacccctcaatttccggccaagtcatttccaaggtgttactcttaaaaagactaaccagttttaggccttgttcatggacaacaagacgatgaagcagcacttgaatgatcgcaacaagcactgtcactacggcaatgccaatggctagcagcgatggcttggtactttctaactgaacaatcgtggcaaggctgatcccgatcacgatcatactccaaaacatgctaaaatcgatccaggcaggttgataatgagttcggtattctggcactttgacacttccttaggagaaattatgcttaaactatacacagatggcgcgacaaaaggcaacccaggacccgctgggatcggcatcttggtcagtggcttgccccatcaaattcaaaaacatgctgcactgccagcaatgagtaatcatgaagccgagtttgcagccgcaatcgctggttttgaactgctgagccaagccggcttaaatacaacaccggtcgccttctacagtgattccaagcttgtgattcaggcgattgaaaagcaatacgctaagcactatcccgacctagcaggccgtttactgaccttaatcggtcaatttcctttagtattgccaaactggctgcctgaccgggccaatcgcggcgcccatatgttagctcagcgagggttgcgccaatctgaaactaaaatataaattttcggcaaaattgcgtcatgactagaacaatcgaggcaaaaagcaatttttcttgccagacgccactctcgtcggtactggcgccgtgatcattaagttcaacaaaagcttgtttctgagaaaagaaaaggcaaccatttccttgtagacggaaacggttgcctttattaatggttgtgaataatatcccaactttgtcgt
